(19) United States
(12) Patent Application Publication
(10) Pub. No.: US 2019/0054158 A1
(43) Pub. Date: Feb. 21, 2019

(54) COMPOSITIONS AND METHODS FOR THE TREATMENT OF AADC DEFICIENCY

(71) Applicant: VOYAGER THERAPEUTICS, INC., CAMBRIDGE, MA (US)

(72) Inventors: Robert Kotin, Bethesda, MD (US); Adrian Philip Kells, Cambridge, MA (US); Bernard Ravina, Newton, MA (US)

(21) Appl. No.: 16/179,116

(22) Filed: Nov. 2, 2018

Related U.S. Application Data
(63) Continuation of application No. 15/749,019, filed on Jan. 30, 2018.
(60) Provisional application No. 62/334,604, filed on May 11, 2016.
(60) Provisional application No. 62/243,545, filed on Oct. 19, 2015.
(60) Provisional application No. 62/199,592, filed on Jul. 31, 2015.

(51) Int. Cl. A61K 38/51; A61P 25/00; A61K 48/00

(52) U.S. Cl. CPC A61K 38/51; C12Y 401/01028; A61K 48/005; A61P 25/00

(57) ABSTRACT

The disclosure relates to compositions and methods for the preparation, manufacture and therapeutic use of polynucleotides encoding AADC for the treatment, prophylaxis, palliation or amelioration of diseases, conditions and/or symptoms resulting from AADC deficiency and related inborn errors of neurotransmitter metabolism.

### CROSS REFERENCE TO RELATED APPLICATIONS

[0001] This application is a continuation application which claims the benefit of U.S. patent application Ser. No. 15/749,019, filed Jan. 30, 2018, and entitled Compositions and Methods for the Treatment of AADC Deficiency; which is a U.S. National Stage application under 35 U.S.C. § 371 of International patent Application No. PCT/US2016/044627, filed Jul. 29, 2016, and entitled Compositions and Methods for the Treatment of AADC Deficiency; which claims the benefit of U.S. Provisional Patent Application No. 62/199,592, filed Jul. 31, 2015, and entitled Compositions and Methods for the Treatment of AADC Deficiency, U.S. Provisional Patent Application No. 62/243,545, filed Oct. 19, 2015, and entitled Compositions and Methods for the Treatment of AADC Deficiency, and U.S. Provisional Patent Application No. 62/334,604, filed May 11, 2016, and entitled Compositions and Methods for the Treatment of AADC Deficiency; the contents of each of which are herein incorporated by reference in their entirety.

### REFERENCE TO SEQUENCE LISTING

[0002] The present application is being filed along with a Sequence Listing in electronic format. The Sequence Listing file, entitled 2057_1024USCON_SL.txt, was created on Nov. 2, 2018 and is 4,373,078 bytes in size. The information in electronic format of the Sequence Listing is incorporated herein by reference in its entirety.

### FIELD OF THE DISCLOSURE

[0003] The present disclosure relates to compositions, particularly nucleic acid molecules, e.g., polynucleotides encoding aromatic L-amino acid decarboxylase (AADC), for use in the treatment of AADC Deficiency (AADCD) and related childhood monoamine neurotransmitter disorders. In some embodiments polynucleotides may be encoded by or within recombinant adeno-associated viruses (AAVs).

### BACKGROUND

[0004] Childhood neurotransmitter disorders are increasingly recognized as an expanding group of inherited neurometabolic syndromes. They are caused by disturbance in synthesis, metabolism, and homeostasis of the monoamine neurotransmitters, including the catecholamines (dopamine, norepinephrine, and epinephrine) and serotonin. Early and accurate diagnosis of childhood neurotransmitter disorders is important, as many are amenable to therapeutic intervention. Principles of treatment for childhood monoamine neurotransmitter disorders are based on an understanding of the relevant metabolic pathways. Most monoamine neurotransmitter disorders lead to reduced levels of central dopamine and/or serotonin, and monoamine neurotransmitter disorders associated with abnormal dopamine metabolism are associated with predominantly neurological phenotypes. Complete amelioration of motor symptoms is achievable in some disorders, such as Segawa's syndrome, and, in other conditions, significant improvement in quality of life can be attained with pharmacotherapy (Ng, et al., 2014, Pediatr. Drugs (2014) 16:275-291).

[0005] Defects in the AADC gene cause aromatic L-amino-acid decarboxylase deficiency (AADCD). AADCD is a progressive and debilitating neurodegenerative disease of the CNS arising as an inborn error in neurotransmitter metabolism. Thus, the disease almost always first appears at birth or early infancy. Because the AADC gene is involved in the synthesis of the neurotransmitters dopamine and serotonin, children with AADCD exhibit developmental delays, and severe neurologic dysfunction, including motor, sensory as well as involuntary muscle dysfunctions. Other clinical manifestations of AADCD include muscular hypotonia, dystonia, hypokinesia, athetosis, chorea, oculogyric crises, feeding or speech difficulty, insomnia, irritability, cyanosis, and various signs of autonomic dysfunction such as excessive sweating or temperature instability, beginning in infancy and early childhood (Brun et al., 2010, Neurology, 75(1):64-71). Response to current treatments is often disappointing.

[0006] In general, finding successful treatments for neurodegenerative diseases is particularly difficult due to the post-mitotic nature of central nervous system (CNS) neurons and the limited ability of neuronal cells to regenerate. Furthermore, because the blood-brain barrier (BBB) impedes peripheral access to the brain, there are inherent limitations on delivery of protein and peptide-based therapeutics. The mature BBB serves as a protective barrier that excludes potentially damaging molecules and microorganisms based on size, charge, and lipid solubility. Consequently, the mature BBB efficiently blocks rAAV diffusion into the CNS. Thus, historically, to efficiently target the CNS using rAAV, researchers have had to resort to direct intraparenchymal injections (Manfredsson, et al., 2009, “AAV9: a potential blood-brain barrier buster.” Molecular Therapy 17(3):403-405). Overall, gene therapeutic approaches allowing the delivery of genes engineered for efficient CNS expression may be the most promising platform for treatment, prophylaxis and/or amelioration of CNS neurodegenerative disorders. (Feng and Maguire-Zeiss, 2010, CNS Drugs 24(3):177-192).

[0007] Because pharmacological treatment has only marginal effects on some of the symptoms and does not change early childhood mortality, gene therapy is the strategy of choice for treating AADCD. However, the current gene therapy for AADC deficiency only targets the putamen, leaving other areas in the brain and body untreated (Hwu, W. L., et al., 2012. Gene therapy for aromatic L-amino acid decarboxylase deficiency. Sci. Transl. Med. Vol. 4, 134ra61). Another shortcoming of some studies is that AAV2 does not undergo retrograde axonal transport in the brain and putaminally-infused vector would not be expected to transduce affected catecholaminergic neurons with any appreciable efficiency. Furthermore, anterograde transport of AAV2 and its payload after putaminal infusion resulted in AADC expression in many non-targeted nuclei such as globus pallidus, subthalamic nucleus and substantia nigra pars reticulata (SNpr).

[0008] Thus, a long-felt need remains for gene therapies for the treatment, amelioration, palliation or prophylaxis of AADCD and related inborn errors of neurotransmitter metabolism; such therapies may augment the diminished neurotransmitter(s), by directly or indirectly increasing their production, extending their half-life and/or decreasing their metabolism.

[0009] The adeno-associated virus (AAV) is a member of the parvovirus family and has emerged as an attractive vector for gene therapy in large part because this virus is apparently non-pathogenic; in fact, AAV has not been associated with any human disease. Further appeal is due to its ability to transduce dividing and non-diving cells (including efficient transduction of neurons), diminished proinflammatory and immune responses in humans, its inability to autonomously replicate without a helper virus (AAV is a helper-dependent DNA parvovirus which belongs to the genus Dependovirus), and its long-term gene expression. Although over 10 recombinant AAV serotypes (rAAV) have been engineered into vectors, rAAV2 is the most frequently employed serotype for gene therapy trials. Additional rAAV serotypes have been developed and tested in animal models that are more efficient at neuronal transduction.

[0010] The present disclosure provides improved nucleic acid constructs, e.g., polynucleotides, for use with AAV-derived vectors comprising the polynucleotides encoding aromatic L-amino acid decarboxylase (AADC) gene sequence (also known as “DOPA decarboxylase” or “DDC” and identified as gene/locus MIM number 107930 on chromosome 7p12) which encodes a full-length AADC protein for the purpose of gene therapy in the treatment of AADCD.

### SUMMARY OF THE DISCLOSURE

[0011] Described herein are methods, processes, compositions kits and devices for the administration of AADC polynucleotides encoded by or contained within recombinant adeno-associated viruses (AAV) or viral particles for the treatment, prophylaxis, palliation and/or amelioration of AADCD and related inborn errors of neurotransmitter metabolism.

[0012] In one aspect, the present disclosure provides a method of treating AADC deficiency or a related childhood monoamine neurotransmitter disorder by administering a composition which may have at least one AAV particle, to the substantia nigra pars compacta of a subject in need of treatment or amelioration of said disorder. In one aspect, the subject in need of treatment is a human between 2 and 8 years old. The AAV particle of the disclosure may include an AADC polynucleotide with at least 95% identity to SEQ ID NOs 2-24. In one aspect, the AADC polynucleotide may have 99% identity to SEQ ID NOs 2-24.

[0013] In another aspect, the present disclosure provides a method of treating AADC deficiency or a related childhood monoamine neurotransmitter disorder by administering a composition which may have at least one AAV particle, to the putamen of a subject in need of treatment or amelioration of said disorder. The AAV particle of the disclosure may include an AADC polynucleotide with at least 95% identity to SEQ ID NOs 2-24.

[0014] In another aspect, the present disclosure provides a method of improving the sleep-wake cycle of a subject by administering to the subject a composition which may include at least one AAV particle to the putamen of a subject in need of treatment or amelioration of said disorder, wherein the AAV particle may include an AADC polynucleotide such as, but not limited to, SEQ ID NOs 2-24 or variants having at least 95% identity thereto.

[0015] In another aspect, the present disclosure provides a method of treating a sleep disorder by administering to the subject a composition which may include at least one AAV particle to the putamen of a subject in need of treatment or amelioration of said disorder, wherein the AAV particle may include an AADC polynucleotide such as, but not limited to, SEQ ID NOs 2-24 or variants having at least 95% identity thereto.

[0016] The AAV particle of the present disclosure may include a capsid serotype such as, but not limited to, AAV1, AAV2, AAV2G9, AAV3, AAV3a, AAV3b, AAV3-3, AAV4, AAV4-4, AAV5, AAV6, AAV6.1, AAV6.2, AAV6.1.2, AAV7, AAV7.2, AAV8, AAV9, AAV9.11, AAV9.13, AAV9.16, AAV9.24, AAV9.45, AAV9.47, AAV9.61, AAV9.68, AAV9.84, AAV9.9, AAV10, AAV11, AAV12, AAV16.3, AAV24.1, AAV27.3, AAV42.12, AAV42-1b, AAV42-2, AAV42-3a, AAV42-3b, AAV42-4, AAV42-5a, AAV42-5b, AAV42-6b, AAV42-8, AAV42-10, AAV42-11, AAV42-12, AAV42-13, AAV42-15, AAV42-aa, AAV43-1, AAV43-12, AAV43-20, AAV43-21, AAV43-23, AAV43-25, AAV43-5, AAV44.1, AAV44.2, AAV44.5, AAV223.1, AAV223.2, AAV223.4, AAV223.5, AAV223.6, AAV223.7, AAV1-7/rh.48, AAV1-8/rh.49, AAV2-15/rh.62, AAV2-3/rh.61, AAV2-4/rh.50, AAV2-5/rh.51, AAV3.1/hu.6, AAV3.1/hu.9, AAV3-9/rh.52, AAV3-11/rh.53, AAV4-8/r11.64, AAV4-9/rh.54, AAV4-19/rh.55, AAV5-3/rh.57, AAV5-22/rh.58, AAV7.3/hu.7, AAV16.8/hu.10, AAV16.12/hu.11, AAV29.3/bb.1, AAV29.5/bb.2, AAV106.1/hu.37, AAV114.3/hu.40, AAV127.2/hu.41, AAV127.5/hu.42, AAV128.3/hu.44, AAV130.4/hu.48, AAV145.1/hu.53, AAV145.5/hu.54, AAV145.6/hu.55, AAV161.10/hu.60, AAV161.6/hu.61, AAV33.12/hu.17, AAV33.4/hu.15, AAV33.8/hu.16, AAV52/hu.19, AAV52.1/hu.20, AAV58.2/hu.25, AAVA3.3, AAVA3.4, AAVA3.5, AAVA3.7, AAVC1, AAVC2, AAVC5, AAV-DJ, AAV-DJ8, AAVF3, AAVF5, AAVH2, AAVrh.72, AAVhu.8, AAVrh.68, AAVrh.70, AAVpi.1, AAVpi.3, AAVpi.2, AAVrh.60, AAVrh.44, AAVrh.65, AAVrh.55, AAVrh.47, AAVrh.69, AAVrh.45, AAVrh.59, AAVhu.12, AAVH6, AAVLK03, AAVH-1/hu.1, AAVH-5/hu.3, AAVLG-10/rh.40, AAVLG-4/rh.38, AAVLG-9/hu.39, AAVN721-8/rh.43, AAVCh.5, AAVCh.5R1, AAVcy.2, AAVcy.3, AAVcy.4, AAVcy.5, AAVCy.5R1, AAVCy.5R2, AAVCy.5R3, AAVCy.5R4, AAVcy.6, AAVhu.1, AAVhu.2, AAVhu.3, AAVhu.4, AAVhu.5, AAVhu.6, AAVhu.7, AAVhu.9, AAVhu.10, AAVhu.11, AAVhu.13, AAVhu.15, AAVhu.16, AAVhu.17, AAVhu.18, AAVhu.20, AAVhu.21, AAVhu.22, AAVhu.23.2, AAVhu.24, AAVhu.25, AAVhu.27, AAVhu.28, AAVhu.29, AAVhu.29R, AAVhu.31, AAVhu.32, AAVhu.34, AAVhu.35, AAVhu.37, AAVhu.39, AAVhu.40, AAVhu.41, AAVhu.42, AAVhu.43, AAVhu.44, AAVhu.44R1, AAVhu.44R2, AAVhu.44R3, AAVhu.45, AAVhu.46, AAVhu.47, AAVhu.48, AAVhu.48R1, AAVhu.48R2, AAVhu.48R3, AAVhu.49, AAVhu.51, AAVhu.52, AAVhu.54, AAVhu.55, AAVhu.56, AAVhu.57, AAVhu.58, AAVhu.60, AAVhu.61, AAVhu.63, AAVhu.64, AAVhu.66, AAVhu.67, AAVhu.14/9, AAVhu.t 19, AAVrh.2, AAVrh.2R, AAVrh.8, AAVrh.8R, AAVrh.10, AAVrh.12, AAVrh.13, AAVrh.13R, AAVrh.14, AAVrh.17, AAVrh.18, AAVrh.19, AAVrh.20, AAVrh.21, AAVrh.22, AAVrh.23, AAVrh.24, AAVrh.25, AAVrh.31, AAVrh.32, AAVrh.33, AAVrh.34, AAVrh.35, AAVrh.36, AAVrh.37, AAVrh.37R2, AAVrh.38, AAVrh.39, AAVrh.40, AAVrh.46, AAVrh.48, AAVrh.48.1, AAVrh.48.1.2, AAVrh.48.2, AAVrh.49, AAVrh.51, AAVrh.52, AAVrh.53, AAVrh.54, AAVrh.56, AAVrh.57, AAVrh.58, AAVrh.61, AAVrh.64, AAVrh.64R1, AAVrh.64R2, AAVrh.67, AAVrh.73, AAVrh.74, AAVrh8R, AAVrh8R A586R mutant, AAVrh8R R533A mutant, AAAV, BAAV, caprine AAV, bovine AAV, AAVhE1.1, AAVhEr1.5, AAVhER1.14, AAVhEr1.8, AAVhEr1.16, AAVhEr1.18, AAVhEr1.35, AAVhEr1.7, AAVhEr1.36, AAVhEr2.29, AAVhEr2.4, AAVhEr2.16, AAVhEr2.30, AAVhEr2.31, AAVhEr2.36, AAVhER1.23, AAVhEr3.1, AAV2.5T, AAV-PAEC, AAV-LK01, AAV-LK02, AAV-LK03, AAV-LK04, AAV-LK05, AAV-LK06, AAV-LK07, AAV-LK08, AAV-LK09, AAV-LK10, AAV-LK11, AAV-LK12, AAV-LK13, AAV-LK14, AAV-LK15, AAV-LK16, AAV-LK17, AAV-LK18, AAV-LK19, AAV-PAEC2, AAV-PAEC4, AAV-PAEC6, AAV-PAEC7, AAV-PAEC8, AAV-PAEC11, AAV-PAEC12, AAV-2-pre-miRNA-101, AAV-8h, AAV-8b, AAV-h, AAV-b, AAV SM 10-2, AAV Shuffle 100-1, AAV Shuffle 100-3, AAV Shuffle 100-7, AAV Shuffle 10-2, AAV Shuffle 10-6, AAV Shuffle 10-8, AAV Shuffle 100-2, AAV SM 10-1, AAV SM 10-8, AAV SM 100-3, AAV SM 100-10, BNP61 AAV, BNP62 AAV, BNP63 AAV, AAVrh.50, AAVrh.43, AAVrh.62, AAVrh.48, AAVhu.19, AAVhu.11, AAVhu.53, AAV4-8/rh.64, AAVLG-9/hu.39, AAV54.5/hu.23, AAV54.2/hu.22, AAV54.7/hu.24, AAV54.1/hu.21, AAV54.4R/hu.27, AAV46.2/hu.28, AAV46.6/hu.29, AAV128.1/hu.43, true type AAV (ttAAV), UPENN AAV 10, Japanese AAV 10, AAV CBr-7.1, AAV CBr-7.10, AAV CBr-7.2, AAV CBr-7.3, AAV CBr-7.4, AAV CBr-7.5, AAV CBr-7.7, AAV CBr-7.8, AAV CBr-B7.3, AAV CBr-B7.4, AAV CBr-E1, AAV CBr-E2, AAV CBr-E3, AAV CBr-E4, AAV CBr-E5, AAV CBr-e5, AAV CBr-E6, AAV CBr-E7, AAV CBr-E8, AAV CHt-1, AAV CHt-2, AAV CHt-3, AAV CHt-6.1, AAV CHt-6.10, AAV CHt-6.5, AAV CHt-6.6, AAV CHt-6.7, AAV CHt-6.8, AAV CHt-P1, AAV CHt-P2, AAV CHt-P5, AAV CHt-P6, AAV CHt-P8, AAV CHt-P9, AAV CKd-1, AAV CKd-10, AAV CKd-2, AAV CKd-3, AAV CKd-4, AAV CKd-6, AAV CKd-7, AAV CKd-8, AAV CKd-B1, AAV CKd-B2, AAV CKd-B3, AAV CKd-B4, AAV CKd-B5, AAV CKd-B6, AAV CKd-B7, AAV CKd-B8, AAV CKd-H1, AAV CKd-H2, AAV CKd-H3, AAV CKd-H4, AAV CKd-H5, AAV CKd-H6, AAV CKd-N3, AAV CKd-N4, AAV CKd-N9, AAV CLg-F1, AAV CLg-F2, AAV CLg-F3, AAV CLg-F4, AAV CLg-F5, AAV CLg-F6, AAV CLg-F7, AAV CLg-F8, AAV CLv-1, AAV CLv1-1, AAV Clv1-10, AAV CLv1-2, AAV CLv-12, AAV CLv1-3, AAV CLv-13, AAV CLv1-4, AAV Clv1-7, AAV Clv1-8, AAV Clv1-9, AAV CLv-2, AAV CLv-3, AAV CLv-4, AAV CLv-6, AAV CLv-8, AAV CLv-D1, AAV CLv-D2, AAV CLv-D3, AAV CLv-D4, AAV CLv-D5, AAV CLv-D6, AAV CLv-D7, AAV CLv-D8, AAV CLv-E1, AAV CLv-K1, AAV CLv-K3, AAV CLv-K6, AAV CLv-L4, AAV CLv-L5, AAV CLv-L6, AAV CLv-M1, AAV CLv-M11, AAV CLv-M2, AAV CLv-M5, AAV CLv-M6, AAV CLv-M7, AAV CLv-M8, AAV CLv-M9, AAV CLv-R1, AAV CLv-R2, AAV CLv-R3, AAV CLv-R4, AAV CLv-R5, AAV CLv-R6, AAV CLv-R7, AAV CLv-R8, AAV CLv-R9, AAV CSp-1, AAV CSp-10, AAV CSp-11, AAV CSp-2, AAV CSp-3, AAV CSp-4, AAV CSp-6, AAV CSp-7, AAV CSp-8, AAV CSp-8.10, AAV CSp-8.2, AAV CSp-8.4, AAV CSp-8.5, AAV CSp-8.6, AAV CSp-8.7, AAV CSp-8.8, AAV CSp-8.9, AAV CSp-9, AAV.hu.48R3, AAV.VR-355, AAV3B, AAV4, AAV5, AAVF1/HSC1, AAVF11/HSC11, AAVF12/HSC12, AAVF13/HSC13, AAVF14/HSC14, AAVF15/HSC15, AAVF16/HSC16, AAVF17/HSC17, AAVF2/HSC2, AAVF3/HSC3, AAVF4/HSC4, AAVF5/HSC5, AAVF6/HSC6, AAVF7/HSC7, AAVF8/HSC8, and/or AAVF9/HSC9, or any variant thereof. In one aspect, the AAV serotype may be any of the AAV serotypes listed in Table 1, or any variant thereof. In one aspect the AAV serotype may be, but is not limited to, AAV6, AAVrh10, AAV9 (hu14), AAV-DJ and AAV9.47. The AAV particle which may include any of these serotypes described above, may be used for any of the methods described herein.

[0017] The AAV particle of the present disclosure may include an AADC polynucleotide, and the AADC polynucleotide may include a promoter region, 5′ UTR, 3′ UTR and a poly(A) signal. In one aspect the AADC polynucleotide may include at least one 5′ ITR and one 3′ ITR. In one aspect, one or more 5′ ITRs are located 5′ to the promoter region and one or more of the 3′ ITRs are located at the 3′ end of the poly(A) signal. In one aspect the promoter region may include a promoter region which may include an enhancer element, a promoter element, a first exon region, a first intron region, a second intron region and a second exon region. In one aspect, the enhancer element and the promoter element are derived from cytomegalovirus (CMV). In one aspect, wherein the first exon region is ie1 exon 1 or fragments thereof, the first intron region is ie1 intron 1 or fragments thereof, the second intron region is hβglobin intron 2 or fragments thereof and the second exon region is hβglobin exon 3 or fragments thereof. In one aspect, the poly(A) signal is derived from human growth hormone. The AAV particle which may include any of AADC polynucleotides described above, may be used for any of the methods described herein.

[0018] Any of the methods described herein may utilize a composition which includes a ratio of at least 70:30 AAV particle which may include the AADC polynucleotide to AAV particles without the AADC polynucleotide. In one aspect, the ratio of AAV particle which may include AADC polynucleotide to AAV particle without AADC polynucleotide is at least 85:15. In another aspect, the ratio of AAV particle which may include an AADC polynucleotide to AAV particle without AADC polynucleotide is 100:0.

[0019] In any of the methods described herein, during the administration of the composition to a subject in need thereof, the subject may use a compression device during the contacting of the subject with the composition. In one aspect, the compression device may reduce the likelihood of deep vein thrombosis in the subject.

[0020] The details of various embodiments of the disclosure are set forth in the description below. Other features, objects, and advantages of the disclosure will be apparent from the description and from the claims.

### DETAILED DESCRIPTION

[0021] A brief description of the AADC gene and neurotransmitter synthesis: Dopamine is the precursor of catecholaminergic hormones and is also itself a neurotransmitter in the basal ganglia. Dopamine is involved in many processes in the CNS, including motor function, cognition, mood, REM sleep and even certain behaviors. At least five types of dopamine receptors occur throughout the body and are responsible for various effects of the neurotransmitter. The cell bodies of dopamine-producing neurons are found in a region of the brain called the substantia nigra pars compacta (SNpc), and the neurons project to a part of the brain called the striatum. Overall, in the brain, dopamine is transmitted along five paths including (1) the mesolimbic-mesocortical pathway, projecting from the substantia nigra to the limbic system and neocortex, involved in the reward system and implicated in addiction; (2) the nigrostriatal pathway, which projects from the substantia nigra to the striatum and is particularly involved in producing movement; (3) the tuberoinfundibular system in which nuclei in the hypothalamus produce and release dopamine into the portal circulation of the pituitary gland to inhibit secretion of prolactin from the anterior pituitary; (4) the medullary-periventricular pathway, which consists of neurons in the motor portion of the vagus nerve, and which pathway is suspected in eating behavior; and (5) the incertohypothalamic pathway, which may play a role in the anticipatory phase of sexual interaction. Non-striatal dopamine is also made by proximal tubule cells of the kidney where it is thought to act locally.

[0022] Dopamine is largely synthesized from the amino acid tyrosine in a series of enzymatic reactions initiated by the conversion of tyrosine to L-dopa by tyrosine hydroxylase and its co-factor tetrahydrobiopterin. L-dopa (a.k.a. levodopa) is then decarboxylated by aromatic L-amino acid decarboxylase (AADC) to form dopamine. AADC is a homodimeric pyridoxal phosphate-dependent enzyme involved in the synthesis of not only dopamine; it also decarboxylates L-5-hydroxytryptophan to serotonin and L-tryptophan to tryptamine. Dopamine is responsible for reward-driven learning, voluntary movement control, feeding, neuroendocrine secretion, cognition, and behavior. Serotonin has important neuromodulatory actions in cognitive, emotional, impulse control, circadian rhythm, sleep-wake cycle, pain, respiratory, and cardiovascular functions.

[0023] As an inborn error of metabolism, defects in the AADC gene result in a deficit of dopamine, serotonin and, manifesting in infancy as various and several neurological and developmental delays. In some cases of AADCD, biochemical symptoms include very low concentrations of homovanillic acid (HVA) and 5-hydroxy indole acetic acid (5-HIAA) in cerebrospinal fluid (CSF). Levels of 3-methoxy-4-hydroxyphenolglycole and norepinephrine may also be reduced. Also noted are a significant elevation in the urinary excretion of L-DOPA, 5-hydroxytryptophan (SHTP), and 3-methoxytyrosine, all of which precede the AADC enzymatic step in the biochemical pathway. AADC enzyme activity is severely reduced in plasma and in liver tissue (˜1% of control); thus, serotonin and dopamine synthesis are both affected in the central and peripheral nervous systems. About 24% of patients have an abnormal brain MM, with cerebral atrophy, degenerative changes of the white matter, thinning of the corpus callosum, or a leukodystrophy-like pattern (Brun et al., 2010, Neurology, 75(1):64-71).

[0024] AADC deficiency has an increased prevalence in the Taiwanese population due to a founder mutation IVS6+4 A>T. In one report, 13 of the 16 mutated alleles (81.3%) in Taiwanese patients with AADC deficiency carried the IVS6+4 A>T mutation. Most Taiwanese patients with AADC deficiency present with oculogyric crisis and hypotonia before 1 year of age (H. F. Lee, et al., 2009, “Aromatic L-amino acid decarboxylase deficiency,” Taiwan. Eur. J. Paediatr. Neurol. 13:135-140).

[0025] Neurotransmitter replacement therapies (e.g., administration of levodopa) have been used to treat Parkinson's Disease (PD), a relatively common neurological disorder in which degeneration of a group of dopaminergic neurons in the midbrain leads to a deficiency of dopamine in the striatum. However, such pharmacotherapeutic techniques often yield diminishing benefits as the disease progresses and dopamine-generating cells die. Furthermore, systemic administration of high-dose dopamine is complicated by side effects, such as fluctuations in motor performance, dyskinesias, and hallucinations, resulting from dopaminergic stimulation of the mesolimbic system.

[0026] An early study in a rat model of PD showed that, upon adeno-associated virus (AAV)-AADC transduction, the transgenic AADC is able to decarboxylate exogenous L-DOPA more efficiently, such that a dose of L-DOPA previously ineffective before gene transfer was able to elicit a positive motor behavioral response following gene transfer. In animals receiving AAV2-AADC, dopamine production was restored to 50% of normal levels 12 weeks after the infusion. Microdialysis experiments demonstrated an in vivo enhanced conversion of L-DOPA to dopamine, but no storage capacity as dopamine was released to the extracellular space in a continuous, nonregulated fashion. It was suggested that, in addition to the potential clinical benefit of improving decarboxylation efficiency in Parkinson's disease, this approach might have some relevance for the treatment of AADC deficiency (Sanchez-Pernaute, et al., 2001, “Functional effect of adeno-associated virus mediated gene transfer of aromatic 1-amino acid decarboxylase into the striatum of 6-OHDA-lesioned rats.” Mol. Ther. 4:324-330).

[0027] In a primate model of PD, a mixture of three separate AAV vectors expressing tyrosine hydroxylase (TH), AADC, and GTP cyclohydrolase I (GCH) was stereotaxically injected into the unilateral putamen of 1-methyl-4-phenyl-1,2,3,6-tetrahydropyridine-treated monkeys, and coexpression of the enzymes in the unilateral putamen resulted in improvement in manual dexterity on the side contralateral to the AAV-TH/-AADC/-GCH-injected side, which persisted during the observation period (Muramatsu, et al., 2002, “Behavioral recovery in a primate model of Parkinson's disease by triple transduction of striatal cells with adeno-associated viral vectors expressing dopamine-synthesizing enzymes.” Hum. Gene Ther. 13: 345-354). Another study employing gene therapy to deliver AADC by intraputaminal infusion resulted in restored dopaminergic function and minimized side effects. The adeno-associated virus (AAV) serotype 2 vector, AAV-hAADC-2, was found to increase extracellular dopamine in the striatum after administration of levodopa (Muramatsu, et al., 2010, “A phase I study of aromatic L-amino acid decarboxylase gene therapy for Parkinson's disease.” Mol. Ther. 18:1731-1735; Forsayeth, J., et al., 2010, “Gene therapy for Parkinson's disease: Where are we now and where are we going?” Expert Review of Neurotherapeutics 10 (12): 1839). To treat the main symptoms of AADC-deficiency include motor impairment, a similar gene therapy approach has been suggested (Allen, et al., 2009, “A new perspective on the treatment of aromatic L-amino acid decarboxylase deficiency.” Mol. Genet. Metab. 97:6-14).

[0028] An AADC deficient murine model has been developed, by inserting an AADC gene mutation (IVS6+4A>T) and a neomycin-resistance gene into intron 6 of the mouse AADC (Ddc) gene. In the brains of homozygous knock-in (KI) mice (Ddc^{IVS6/IVS6}), AADC mRNA lacked exon 6, and AADC activity was <0.3% of that in wild-type mice. Half of the KI mice were born alive but grew poorly and exhibited severe dyskinesia and hind limb clasping after birth. Two-thirds of the live-born KI mice survived the weaning period, with subsequent improvements in their growth and motor functions; however, these mice still displayed cardiovascular dysfunction and behavioral problems due to serotonin deficiencies. The brain dopamine levels in the KI mice increased from 9.39% of the levels in wild-type mice at 2 weeks of age to 37.86% of the levels in wild-type mice at 8 weeks of age. Adult KI mice also exhibited an exaggerated response to apomorphine and an elevation of striatal c-Fos expression, suggesting post-synaptic adaptations; thus, compensatory regulation apparently allowed these mice to survive to adulthood (Lee, et al., 2013, Neurobiology of Disease 52:177-190).

[0029] In AADC-deficient children, a recent gene replacement clinical trial explored putaminal delivery of recombinant adeno-associated virus serotype 2 vector encoding human AADC (AAV2-hAADC). Unfortunately, the AADCD patients showed only modest amelioration of motor symptoms, hypothesized to be due to insufficient transduction of the putamen. With the development of a highly accurate MRI-guided cannula placement technology, a more effective approach targeted the affected mid-brain neurons directly. Transduction of AADC-deficient dopaminergic neurons in the substantia nigra with locally infused AAV2-hAADC was expected to lead to restoration of normal dopamine levels in affected children. The long-term safety and tolerability of bilateral AAV2-hAADC MM-guided pressurized infusion into the mid-brain was also assessed in non-human primates; the animals received either vehicle, low or high AAV2-hAADC vector dose and were euthanized 1, 3 or 9 months after surgery, and effective mid-brain transduction was achieved without untoward effects (San Sebastian, et al., 2014, Mol. Ther. Methods Clin. Dev. 3: 14049).

[0030] Pharmacotherapeutic techniques have also been used to treat AADCD. Clinical management of AADCD usually involves pyridoxine (B6)/pyridoxal phosphate, dopamine agonists, and monoamine oxidase B inhibitors to potentiate monoaminergic transmission, in attempt to provide some improvement in tone and movement. Standard treatments for AADCD are: Pyridoxine 20-160 mg/kg/day; Folinic acid (calcium folinate) 15 mg/day [BNFC 2014]; Dopamine agonists: Rotigotine, patch dose as per BNFC; 2,4,6,8 mg dose patches available and applied once a day (doses 0.17-0.25 mg/kg/day used) (other dopamine agonists used; pergolide, bromocriptine, pramipexole, ropinirole); MAOI selegiline 0.03-2 mg/kg/day; Trihexyphenydyl 1-12 mg/day titrated (often higher doses are tolerated but titrated slowly); Benztropine 1-4 mg/day; Clonidine 0.1-3 total mg/day (BNFC initial test dose is recommended with higher doses used with caution due to antihypertensive action); Benzodiazepines (Ng, et al., 2014, Pediatr. Drugs (2014) 16:275-291). However, in some cases, such treatments were found not to be very beneficial. Furthermore, in assessing treatment response among one group of AADC patients, a sex difference in the monoaminergic system was observed: a subgroup of five males responded to treatment and made developmental progress, while a second subgroup of five females and one male responded poorly to treatment and often developed drug-induced dyskinesias. Thus, females appeared more dependent on the dopamine system (Pons et al., 2004, Neurology 62:1058-1065).

[0031] In one embodiment, the nucleic acid constructs described herein may comprise at least a 5′-ITR and a 3′-ITR, each or both of which may be derived from an AAV, positioned about a DDC gene sequence, as well as additional components required for gene expression and clone selection.

### COMPOSITIONS OF THE DISCLOSURE

[0032] According to the present disclosure, AADC polynucleotides (specifically, novel SEQ ID Nos. 2 to 24) are provided which function alone or combinations thereof with additional nucleic acid sequence(s) to encode the AADC protein. As used herein an “AADC polynucleotide” is any nucleic acid which encodes an AADC protein and when present in a vector, plasmid or translatable construct, expresses such AADC protein in a cell, tissue, organ or organism.

[0033] AADC polynucleotides include precursor molecules which are processed inside the cell. AADC polynucleotides, or the processed forms thereof, may be encoded in a plasmid, vector, genome or other nucleic acid expression vector for delivery to a cell.

[0034] In some embodiments AADC polynucleotides are designed as components of AAV viral genomes and packaged in AAV viral particles which are processed within the cell to produce the wild type AADC protein.

[0035] As used herein, the wild type AADC protein may be any of the naturally occurring isoforms or variants from the DDC gene. Multiple alternatively spliced transcript variants encoding different isoforms of AADC have been identified. Specifically, the DDC gene produces seven transcript variants that encode six distinct isoforms. DDC transcript variants 1 and 2 both encode AADC isoform 1. In some embodiments, the AADC polynucleotides encode DDC transcript variant 2, thereby encoding a native AADC isoform 1 (NCBI Reference Sequence: NP 000781.1), which amino acid sequence is identified here as SEQ ID NO:1:

MNASEFRRRGKEMVDYVANYMEGIEGRQVYPDVEPGYLRPLIPAAAPQE
PDTFEDIINDVEKIIMPGVTHWHSPYFFAYFPTASSYPAMLADMLCGAI
GCIGFSWAASPACTELETVMMDWLGKMLELPKAFLNEKAGEGGGVIQGS
ASEATLVALLAARTKVIHRLQAASPELTQAAIMEKLVAYSSDQAHSSVE
RAGLIGGVKLKAIPSDGNFAMRASALQEALERDKAAGLIPFFMVATLGT
TTCCSFDNLLEVGPICNKEDIWLHVDAAYAGSAFICPEFRHLLNGVEFA
DSFNFNPHKWLLVNFDCSAMWVKKRTDLTGAFRLDPTYLKHSHQDSGLI
TDYRHWQIPLGRRFRSLKMWFVFRMYGVKGLQAYIRKHVQLSHEFESLV
RQDPRFEICVEVILGLVCFRLKGSNKVNEALLQRINSAKKIHLVPCHLR
DKFVLRFAICSRTVESAHVQRAWEHIKELAADVLRAERE.

[0036] The AADC polynucleotides disclosed herein may be engineered to contain modular elements and/or sequence motifs assembled to create AADC polynucleotide constructs.

### AADC Polynucleotide Constructs

[0037] In some embodiments, the AADC polynucleotide comprises a sequence of any of SEQ ID NOs: 2 to 24, or a fragment thereof. Such polynucleotides comprise nucleic acids which comprise a region of linked nucleosides encoding one or more isoforms or variants of the AADC protein.

[0038] In some embodiments, the AADC polynucleotide comprises a codon optimized transcript encoding an AADC protein.

[0039] In one embodiment, the AADC polynucleotide comprises a sequence which has a percent identity to any of SEQ ID NOs: 2-24. The AADC polynucleotide may have 1%, 2%, 3%, 4%, 5%, 6%, 7%, 8%, 9%, 10%, 15%, 20%, 25%, 30%, 35%, 40%, 45%, 50%, 55%, 60%, 65%, 70%, 75%, 80%, 85%, 90%, 95%, 99% or 100% identity to any of SEQ ID NOs: 2-24. The AADC polynucleotide may have 1-10%, 10-20%, 30-40%, 50-60%, 50-70%, 50-80%, 50-90%, 50-99%, 50-100%, 60-70%, 60-80%, 60-90%, 60-99%, 60-100%, 70-80%, 70-90%, 70-99%, 70-100%, 80-85%, 80-90%, 80-95%, 80-99%, 80-100%, 90-95%, 90-99%, or 90-100% to any of SEQ ID NOs: 2-24. As a non-limiting example, the AADC polynucleotide comprises a sequence which has 80% identity to any of SEQ ID NOs 6, 7, 8, 9, 17, 18, 19, 20, 21, 22, 23 and 24. As another non-limiting example, the AADC polynucleotide comprises a sequence which has 85% identity to any of SEQ ID NOs 6, 7, 8, 9, 17, 18, 19, 20, 21, 22, 23 and 24. As another non-limiting example, the AADC polynucleotide comprises a sequence which has 90% identity to any of SEQ ID NOs 6, 7, 8, 9, 17, 18, 19, 20, 21, 22, 23 and 24. As another non-limiting example, the AADC polynucleotide comprises a sequence which has 95% identity to any of SEQ ID NOs 6, 7, 8, 9, 17, 18, 19, 20, 21, 22, 23 and 24. As another non-limiting example, the AADC polynucleotide comprises a sequence which has 99% identity to any of SEQ ID NOs 6, 7, 8, 9, 17, 18, 19, 20, 21, 22, 23 and 24. As a non-limiting example, the AADC polynucleotide comprises a sequence which has 80% identity to SEQ ID NO 24. As another non-limiting example, the AADC polynucleotide comprises a sequence which has 85% identity to SEQ ID NO 24. As another non-limiting example, the AADC polynucleotide comprises a sequence which has 90% identity to SEQ ID NO 24. As another non-limiting example, the AADC polynucleotide comprises a sequence which has 95% identity to SEQ ID NO 24. As another non-limiting example, the AADC polynucleotide comprises a sequence which has 99% identity to SEQ ID NO 24.

[0040] In some embodiments, the AADC polynucleotide comprises a sequence region encoding one or more wild type isoforms or variants of an AADC protein. Such polynucleotides may also comprise a sequence region encoding any one or more of the following: a 5′ ITR, a cytomegalovirus (CMV) Enhancer, a CMV Promoter, a synapsin 1 promoter, an ie1 exon 1, an ie1 intron1, intron 1 of human growth hormone, a β globin intron, an hβglobin intron2, an hβglobin exon 3, a 5′ UTR, a 3′ UTR, an hGH poly(A) signal, a simian virus 40 polyadenylation signal, a post-transcriptional regulatory element, a woodchuck hepatitis virus post-transcriptional regulatory element, and/or a 3′ ITR. Such sequence regions are taught herein or may be any of those known in the art.

[0041] In some embodiments the AADC coding region is 1440 nucleotides in length. Such an AADC polynucleotide may be codon optimized over all or a portion of the polynucleotide.

[0042] In some embodiments the AADC coding region is 1443 nucleotides in length. In such case, an additional codon may be present at the 3′ end of the polynucleotide.

[0043] In some embodiments the AADC coding region is 1449 nucleotides in length. In such case, additional codons may be present at the 3′ end of the polynucleotide.

[0044] In some embodiments, the AADC polynucleotide comprises any of SEQ ID NOs 13-24 but lacking the 5′ and/or 3′ ITRs. Such a polynucleotide may be incorporated into a plasmid or vector and utilized to express the encoded AADC protein.

[0045] In one embodiment, the AADC polynucleotide may comprise a codon optimized open reading frame of an AADC mRNA, at least one 5′ITR and at least one 3′UTR where the one or more of the 5′ITRs may be located at the 5′ end of the promoter region and one or more 3′ ITRs may be located at the 3′ end of the poly(A) signal. The AADC mRNA may comprise a promoter region, a 5′ untranslated region (UTR), a 3′UTR and a poly(A) signal. The promoter region may include, but is not limited to, enhancer element, a promoter element, a first exon region, a first intron region, a second intron region and a second exon region. As a non-limiting example, the enhancer element and the promoter element are derived from CMV. As another non-limiting example, the intron is derived from human growth factor. As another non-limiting example, the intron is derived from β globin. As another non-limiting example, the first exon region is ie1 exon 1 or fragments thereof, the first intron region is ie1 intron 1 or fragments thereof, the second intron region is hβglobin intron 2 or fragments thereof and the second exon region is hβglobin exon 3 or fragments thereof. As yet another non-limiting example, the poly(A) signal is derived from human growth hormone. As another non-limiting example, the poly(A) signal is derived from simian virus 40.

### Viral Vectors

[0046] The AADC polynucleotides disclosed herein can be introduced into host cells using any of a variety of approaches. Infection with a viral vector comprising the AADC polynucleotide can be effected. Examples of suitable viral vectors include replication defective retroviral vectors, adenoviral vectors, adeno-associated vectors and lentiviral vectors.

[0047] According to the present disclosure, viral vectors for use in therapeutics and/or diagnostics comprise a virus that has been distilled or reduced to the minimum components necessary for transduction of a nucleic acid payload or cargo of interest. In this manner, viral vectors are engineered as vehicles for specific delivery while lacking the deleterious replication and/or integration features found in wild-type virus.

[0048] As used herein, a “vector” is any molecule or moiety which transports, transduces or otherwise acts as a carrier of a heterologous molecule such as the polynucleotides described herein. A “viral vector” is a vector which comprises one or more polynucleotide regions encoding or comprising payload molecule of interest, e.g., a transgene, a polynucleotide encoding a polypeptide or multi-polypeptide.

### Viral Vectors: Adeno-Associated Virus (AAV)

[0049] Viral vectors of the present disclosure may be produced recombinantly and may be based on adeno-associated virus (AAV) parent or reference sequence. Serotypes which may be useful in the presently disclosed compositions and methods include any of those arising from AAV1, AAV2, AAV3, AAV4, AAV5, AAV6, AAV7, AAV8, AAV9, AAV9.47, AAV9(hu14), AAV10, AAV11, AAV12, AAVrh8, AAVrh10 and AAV-DJ.

[0050] AAV vectors may also comprise self-complementary AAV vectors (scAAVs). scAAV vectors contain both DNA strands which anneal together to form double stranded DNA. By skipping second strand synthesis, scAAVs allow for rapid expression in the cell.

[0051] Viruses of the Parvoviridae family are small non-enveloped icosahedral capsid viruses characterized by a single stranded DNA genome. Parvoviridae family viruses consist of two subfamilies: Parvovirinae, which infect vertebrates, and Densovirinae, which infect invertebrates. Due to its relatively simple structure, easily manipulated using standard molecular biology techniques, this virus family is useful as a biological tool. The genome of the virus may be modified to contain a minimum of components for the assembly of a functional recombinant virus, or viral particle, which is loaded with or engineered to express or deliver a desired nucleic acid construct or payload, e.g., a transgene, polypeptide-encoding polynucleotide or modulatory nucleic acid, which may be delivered to a target cell, tissue or organism.

[0052] The parvoviruses and other members of the Parvoviridae family are generally described in Kenneth I. Berns, “Parvoviridae: The Viruses and Their Replication,” Chapter 69 in FIELDS VIROLOGY (3d Ed. 1996), the contents of which are incorporated by reference in their entirety.

[0053] The Parvoviridae family comprises the Dependovirus genus which includes adeno-associated viruses (AAV) capable of replication in vertebrate hosts including, but not limited to, human, primate, bovine, canine, equine, and ovine species.

[0054] The AAV particles of the present disclosure comprise a nucleic acid sequence e.g., polynucleotide, encoding at least one “payload.” As used herein, a “payload” refers to one or more polynucleotides or polynucleotide regions encoded by or within a viral genome or an expression product of such polynucleotide or polynucleotide region e.g., a transgene, a polynucleotide encoding a polypeptide or multi polypeptide or a modulatory nucleic acid or regulatory nucleic acid. The term “AAV particle” or “AAV vector” as used herein comprises a capsid and a polynucleotide of payload. The AAV particle may be derived from any serotype, described herein or known in the art, including combinations of serotypes (i.e., “pseudotyped” AAV) or from various genomes (e.g., single stranded or self-complementary). In addition, the AAV particle may be replication defective and/or targeted.

[0055] The payload may comprise any nucleic acid known in the art which is useful for modulating the expression (by supplementation or gene replacement or by inhibition using a modulatory nucleic acid) in a target cell transduced or contacted with the AAV particle carrying the payload.

[0056] Vectors used in the production of AAV particles include those encoding the payload, e.g. payload construct vectors, and those encoding accessory proteins necessary for production, e.g. viral construct vectors.

[0057] According to the present disclosure, an AAV payload construct vector encodes a “payload construct.” In one embodiment, a “payload construct” is a polynucleotide sequence encoding at least a payload and sufficient ITR sequence to allow for replication thereby producing a viral genome that is packaged inside a capsid.

[0058] The payload construct may comprise a combination of coding and non-coding nucleic acid sequences.

[0059] In one embodiment, the AAV payload construct vector comprises more than one nucleic acid sequences encoding more than one payload of interest. In such an embodiment, a payload construct encoding more than one payload may be replicated and packaged into a viral particle. A target cell transduced with a viral particle comprising more than one payload may express each of the payloads in a single cell.

[0060] In some embodiments, the AAV payload construct may encode a coding or non-coding RNA.

[0061] Where the AAV payload construct sequence encodes a polypeptide, the polypeptide may be a peptide or protein. A protein encoded by the AAV payload construct sequence may comprise a secreted protein, an intracellular protein, an extracellular protein, and/or a membrane protein. The encoded proteins may be structural or functional. Proteins encoded by the payload construct vector or payload construct include, but are not limited to, mammalian proteins. The AAV polynucleotides encoding polypeptides (e.g., mRNA) described herein may be useful in the fields of human disease, antibodies, viruses, veterinary applications and a variety of in vivo and in vitro settings.

[0062] In some embodiments, the AAV particles are useful in the field of medicine for the treatment, prophylaxis, palliation or amelioration of AADCD and related childhood monoamine neurotransmitter disorders.

[0063] In some embodiments, the AAV payload construct encodes a messenger RNA (mRNA). As used herein, the term “messenger RNA” (mRNA) refers to any polynucleotide which encodes a polypeptide of interest and which is capable of being translated to produce the encoded polypeptide of interest in vitro, in vivo, in situ or ex vivo.

[0064] Traditionally, the basic components of an mRNA molecule include at least a coding region, a 5′UTR, a 3′UTR, a 5′ cap and a poly-A tail. According to the present disclosure, AAV payload constructs encoding mRNA may comprise a coding region only. They may also comprise a coding region and at least one UTR. They may also comprise a coding region, 3′UTR and polyA tail. In some embodiments, the mRNA or any portion of the AAV may be codon optimized.

### AAV Serotypes

[0065] In one embodiment, the AADC polynucleotide is encoded in a plasmid or vector, which may be derived from an adeno-associated virus (AAV). In one embodiment, the AAV serotype used in the present disclosure may be from a variety of species.

[0066] AAV particles of the present disclosure may comprise or be derived from any natural or recombinant AAV serotype. According to the present disclosure, the AAV particles may utilize or be based on a serotype selected from any of the following AAV1, AAV2, AAV2G9, AAV3, AAV3a, AAV3b, AAV3-3, AAV4, AAV4-4, AAV5, AAV6, AAV6.1, AAV6.2, AAV6.1.2, AAV7, AAV7.2, AAV8, AAV9, AAV9.11, AAV9.13, AAV9.16, AAV9.24, AAV9.45, AAV9.47, AAV9.61, AAV9.68, AAV9.84, AAV9.9, AAV10, AAV11, AAV12, AAV16.3, AAV24.1, AAV27.3, AAV42.12, AAV42-1b, AAV42-2, AAV42-3a, AAV42-3b, AAV42-4, AAV42-5a, AAV42-5b, AAV42-6b, AAV42-8, AAV42-10, AAV42-11, AAV42-12, AAV42-13, AAV42-15, AAV42-aa, AAV43-1, AAV43-12, AAV43-20, AAV43-21, AAV43-23, AAV43-25, AAV43-5, AAV44.1, AAV44.2, AAV44.5, AAV223.1, AAV223.2, AAV223.4, AAV223.5, AAV223.6, AAV223.7, AAV1-7/rh.48, AAV1-8/rh.49, AAV2-15/rh.62, AAV2-3/rh.61, AAV2-4/rh.50, AAV2-5/rh.51, AAV3.1/hu.6, AAV3.1/hu.9, AAV3-9/rh.52, AAV3-11/rh.53, AAV4-8/r11.64, AAV4-9/rh.54, AAV4-19/rh.55, AAV5-3/rh.57, AAV5-22/rh.58, AAV7.3/hu.7, AAV16.8/hu.10, AAV16.12/hu.11, AAV29.3/bb.1, AAV29.5/bb.2, AAV106.1/hu.37, AAV114.3/hu.40, AAV127.2/hu.41, AAV127.5/hu.42, AAV128.3/hu.44, AAV130.4/hu.48, AAV145.1/hu.53, AAV145.5/hu.54, AAV145.6/hu.55, AAV161.10/hu.60, AAV161.6/hu.61, AAV33.12/hu.17, AAV33.4/hu.15, AAV33.8/hu.16, AAV52/hu.19, AAV52.1/hu.20, AAV58.2/hu.25, AAVA3.3, AAVA3.4, AAVA3.5, AAVA3.7, AAVC1, AAVC2, AAVC5, AAV-DJ, AAV-DJ8, AAVF3, AAVF5, AAVH2, AAVrh.72, AAVhu.8, AAVrh.68, AAVrh.70, AAVpi.1, AAVpi.3, AAVpi.2, AAVrh.60, AAVrh.44, AAVrh.65, AAVrh.55, AAVrh.47, AAVrh.69, AAVrh.45, AAVrh.59, AAVhu.12, AAVH6, AAVLK03, AAVH-1/hu.1, AAVH-5/hu.3, AAVLG-10/rh.40, AAVLG-4/rh.38, AAVLG-9/hu.39, AAVN721-8/rh.43, AAVCh.5, AAVCh.5R1, AAVcy.2, AAVcy.3, AAVcy.4, AAVcy.5, AAVCy.5R1, AAVCy.5R2, AAVCy.5R3, AAVCy.5R4, AAVcy.6, AAVhu.1, AAVhu.2, AAVhu.3, AAVhu.4, AAVhu.5, AAVhu.6, AAVhu.7, AAVhu.9, AAVhu.10, AAVhu.11, AAVhu.13, AAVhu.15, AAVhu.16, AAVhu.17, AAVhu.18, AAVhu.20, AAVhu.21, AAVhu.22, AAVhu.23.2, AAVhu.24, AAVhu.25, AAVhu.27, AAVhu.28, AAVhu.29, AAVhu.29R, AAVhu.31, AAVhu.32, AAVhu.34, AAVhu.35, AAVhu.37, AAVhu.39, AAVhu.40, AAVhu.41, AAVhu.42, AAVhu.43, AAVhu.44, AAVhu.44R1, AAVhu.44R2, AAVhu.44R3, AAVhu.45, AAVhu.46, AAVhu.47, AAVhu.48, AAVhu.48R1, AAVhu.48R2, AAVhu.48R3, AAVhu.49, AAVhu.51, AAVhu.52, AAVhu.54, AAVhu.55, AAVhu.56, AAVhu.57, AAVhu.58, AAVhu.60, AAVhu.61, AAVhu.63, AAVhu.64, AAVhu.66, AAVhu.67, AAVhu.14/9, AAVhu.t 19, AAVrh.2, AAVrh.2R, AAVrh.8, AAVrh.8R, AAVrh.10, AAVrh.12, AAVrh.13, AAVrh.13R, AAVrh.14, AAVrh.17, AAVrh.18, AAVrh.19, AAVrh.20, AAVrh.21, AAVrh.22, AAVrh.23, AAVrh.24, AAVrh.25, AAVrh.31, AAVrh.32, AAVrh.33, AAVrh.34, AAVrh.35, AAVrh.36, AAVrh.37, AAVrh.37R2, AAVrh.38, AAVrh.39, AAVrh.40, AAVrh.46, AAVrh.48, AAVrh.48.1, AAVrh.48.1.2, AAVrh.48.2, AAVrh.49, AAVrh.51, AAVrh.52, AAVrh.53, AAVrh.54, AAVrh.56, AAVrh.57, AAVrh.58, AAVrh.61, AAVrh.64, AAVrh.64R1, AAVrh.64R2, AAVrh.67, AAVrh.73, AAVrh.74, AAVrh8R, AAVrh8R A586R mutant, AAVrh8R R533A mutant, AAAV, BAAV, caprine AAV, bovine AAV, AAVhE1.1, AAVhEr1.5, AAVhER1.14, AAVhEr1.8, AAVhEr1.16, AAVhEr1.18, AAVhEr1.35, AAVhEr1.7, AAVhEr1.36, AAVhEr2.29, AAVhEr2.4, AAVhEr2.16, AAVhEr2.30, AAVhEr2.31, AAVhEr2.36, AAVhER1.23, AAVhEr3.1, AAV2.5T, AAV-PAEC, AAV-LK01, AAV-LK02, AAV-LK03, AAV-LK04, AAV-LK05, AAV-LK06, AAV-LK07, AAV-LK08, AAV-LK09, AAV-LK10, AAV-LK11, AAV-LK12, AAV-LK13, AAV-LK14, AAV-LK15, AAV-LK16, AAV-LK17, AAV-LK18, AAV-LK19, AAV-PAEC2, AAV-PAEC4, AAV-PAEC6, AAV-PAEC7, AAV-PAEC8, AAV-PAEC11, AAV-PAEC12, AAV-2-pre-miRNA-101, AAV-8h, AAV-8b, AAV-h, AAV-b, AAV SM 10-2, AAV Shuffle 100-1, AAV Shuffle 100-3, AAV Shuffle 100-7, AAV Shuffle 10-2, AAV Shuffle 10-6, AAV Shuffle 10-8, AAV Shuffle 100-2, AAV SM 10-1, AAV SM 10-8, AAV SM 100-3, AAV SM 100-10, BNP61 AAV, BNP62 AAV, BNP63 AAV, AAVrh.50, AAVrh.43, AAVrh.62, AAVrh.48, AAVhu.19, AAVhu.11, AAVhu.53, AAV4-8/rh.64, AAVLG-9/hu.39, AAV54.5/hu.23, AAV54.2/hu.22, AAV54.7/hu.24, AAV54.1/hu.21, AAV54.4R/hu.27, AAV46.2/hu.28, AAV46.6/hu.29, AAV128.1/hu.43, true type AAV (ttAAV), UPENN AAV 10, Japanese AAV 10 serotypes, AAV CBr-7.1, AAV CBr-7.10, AAV CBr-7.2, AAV CBr-7.3, AAV CBr-7.4, AAV CBr-7.5, AAV CBr-7.7, AAV CBr-7.8, AAV CBr-B7.3, AAV CBr-B7.4, AAV CBr-E1, AAV CBr-E2, AAV CBr-E3, AAV CBr-E4, AAV CBr-E5, AAV CBr-e5, AAV CBr-E6, AAV CBr-E7, AAV CBr-E8, AAV CHt-1, AAV CHt-2, AAV CHt-3, AAV CHt-6.1, AAV CHt-6.10, AAV CHt-6.5, AAV CHt-6.6, AAV CHt-6.7, AAV CHt-6.8, AAV CHt-P1, AAV CHt-P2, AAV CHt-P5, AAV CHt-P6, AAV CHt-P8, AAV CHt-P9, AAV CKd-1, AAV CKd-10, AAV CKd-2, AAV CKd-3, AAV CKd-4, AAV CKd-6, AAV CKd-7, AAV CKd-8, AAV CKd-B1, AAV CKd-B2, AAV CKd-B3, AAV CKd-B4, AAV CKd-B5, AAV CKd-B6, AAV CKd-B7, AAV CKd-B8, AAV CKd-H1, AAV CKd-H2, AAV CKd-H3, AAV CKd-H4, AAV CKd-H5, AAV CKd-H6, AAV CKd-N3, AAV CKd-N4, AAV CKd-N9, AAV CLg-F1, AAV CLg-F2, AAV CLg-F3, AAV CLg-F4, AAV CLg-F5, AAV CLg-F6, AAV CLg-F7, AAV CLg-F8, AAV CLv-1, AAV CLv1-1, AAV Clv1-10, AAV CLv1-2, AAV CLv-12, AAV CLv1-3, AAV CLv-13, AAV CLv1-4, AAV Clv1-7, AAV Clv1-8, AAV Clv1-9, AAV CLv-2, AAV CLv-3, AAV CLv-4, AAV CLv-6, AAV CLv-8, AAV CLv-D1, AAV CLv-D2, AAV CLv-D3, AAV CLv-D4, AAV CLv-D5, AAV CLv-D6, AAV CLv-D7, AAV CLv-D8, AAV CLv-E1, AAV CLv-K1, AAV CLv-K3, AAV CLv-K6, AAV CLv-L4, AAV CLv-L5, AAV CLv-L6, AAV CLv-M1, AAV CLv-M11, AAV CLv-M2, AAV CLv-M5, AAV CLv-M6, AAV CLv-M7, AAV CLv-M8, AAV CLv-M9, AAV CLv-R1, AAV CLv-R2, AAV CLv-R3, AAV CLv-R4, AAV CLv-R5, AAV CLv-R6, AAV CLv-R7, AAV CLv-R8, AAV CLv-R9, AAV CSp-1, AAV CSp-10, AAV CSp-11, AAV CSp-2, AAV CSp-3, AAV CSp-4, AAV CSp-6, AAV CSp-7, AAV CSp-8, AAV CSp-8.10, AAV CSp-8.2, AAV CSp-8.4, AAV CSp-8.5, AAV CSp-8.6, AAV CSp-8.7, AAV CSp-8.8, AAV CSp-8.9, AAV CSp-9, AAV.hu.48R3, AAV.VR-355, AAV3B, AAV4, AAV5, AAVF1/HSC1, AAVF11/HSC11, AAVF12/HSC12, AAVF13/HSC13, AAVF14/HSC14, AAVF15/HSC15, AAVF16/HSC16, AAVF17/HSC17, AAVF2/HSC2, AAVF3/HSC3, AAVF4/HSC4, AAVF5/HSC5, AAVF6/HSC6, AAVF7/HSC7, AAVF8/HSC8, and/or AAVF9/HSC9 and variants thereof.

[0067] As a non-limiting example, the capsid of the recombinant AAV virus is AAV2. As a non-limiting example, the capsid of the recombinant AAV virus is AAVrh10. As a non-limiting example, the capsid of the recombinant AAV virus is AAV9(hu14). As a non-limiting example, the capsid of the recombinant AAV virus is AAV-DJ. As a non-limiting example, the capsid of the recombinant AAV virus is AAV9.47. As a non-limiting example, the capsid of the recombinant AAV virus is AAV-DJ8.

[0068] In some embodiments, the AAV serotype may be, or have, a sequence as described in United States Publication No. US20030138772, the contents of which are herein incorporated by reference in their entirety, such as, but not limited to, AAV1 (SEQ ID NO: 6 and 64 of US20030138772), AAV2 (SEQ ID NO: 7 and 70 of US20030138772), AAV3 (SEQ ID NO: 8 and 71 of US20030138772), AAV4 (SEQ ID NO: 63 of US20030138772), AAV5 (SEQ ID NO: 114 of US20030138772), AAV6 (SEQ ID NO: 65 of US20030138772), AAV7 (SEQ ID NO: 1-3 of US20030138772), AAV8 (SEQ ID NO: 4 and 95 of US20030138772), AAV9 (SEQ ID NO: 5 and 100 of US20030138772), AAV10 (SEQ ID NO: 117 of US20030138772), AAV11 (SEQ ID NO: 118 of US20030138772), AAV12 (SEQ ID NO: 119 of US20030138772), AAVrh10 (amino acids 1 to 738 of SEQ ID NO: 81 of US20030138772), AAV16.3 (US20030138772 SEQ ID NO: 10), AAV29.3/bb.1 (US20030138772 SEQ ID NO: 11), AAV29.4 (US20030138772 SEQ ID NO: 12), AAV29.5/bb.2 (US20030138772 SEQ ID NO: 13), AAV1.3 (US20030138772 SEQ ID NO: 14), AAV13.3 (US20030138772 SEQ ID NO: 15), AAV24.1 (US20030138772 SEQ ID NO: 16), AAV27.3 (US20030138772 SEQ ID NO: 17), AAV7.2 (US20030138772 SEQ ID NO: 18), AAVC1 (US20030138772 SEQ ID NO: 19), AAVC3 (US20030138772 SEQ ID NO: 20), AAVC5 (US20030138772 SEQ ID NO: 21), AAVF1 (US20030138772 SEQ ID NO: 22), AAVF3 (US20030138772 SEQ ID NO: 23), AAVF5 (US20030138772 SEQ ID NO: 24), AAVH6 (US20030138772 SEQ ID NO: 25), AAVH2 (US20030138772 SEQ ID NO: 26), AAV42-8 (US20030138772 SEQ ID NO: 27), AAV42-15 (US20030138772 SEQ ID NO: 28), AAV42-5b (US20030138772 SEQ ID NO: 29), AAV42-1b (US20030138772 SEQ ID NO: 30), AAV42-13 (US20030138772 SEQ ID NO: 31), AAV42-3a (US20030138772 SEQ ID NO: 32), AAV42-4 (US20030138772 SEQ ID NO: 33), AAV42-5a (US20030138772 SEQ ID NO: 34), AAV42-10 (US20030138772 SEQ ID NO: 35), AAV42-3b (US20030138772 SEQ ID NO: 36), AAV42-11 (US20030138772 SEQ ID NO: 37), AAV42-6b (US20030138772 SEQ ID NO: 38), AAV43-1 (US20030138772 SEQ ID NO: 39), AAV43-5 (US20030138772 SEQ ID NO: 40), AAV43-12 (US20030138772 SEQ ID NO: 41), AAV43-20 (US20030138772 SEQ ID NO: 42), AAV43-21 (US20030138772 SEQ ID NO: 43), AAV43-23 (US20030138772 SEQ ID NO: 44), AAV43-25 (US20030138772 SEQ ID NO: 45), AAV44.1 (US20030138772 SEQ ID NO: 46), AAV44.5 (US20030138772 SEQ ID NO: 47), AAV223.1 (US20030138772 SEQ ID NO: 48), AAV223.2 (US20030138772 SEQ ID NO: 49), AAV223.4 (US20030138772 SEQ ID NO: 50), AAV223.5 (US20030138772 SEQ ID NO: 51), AAV223.6 (US20030138772 SEQ ID NO: 52), AAV223.7 (US20030138772 SEQ ID NO: 53), AAVA3.4 (US20030138772 SEQ ID NO: 54), AAVA3.5 (US20030138772 SEQ ID NO: 55), AAVA3.7 (US20030138772 SEQ ID NO: 56), AAVA3.3 (US20030138772 SEQ ID NO: 57), AAV42.12 (US20030138772 SEQ ID NO: 58), AAV44.2 (US20030138772 SEQ ID NO: 59), AAV42-2 (US20030138772 SEQ ID NO: 9), or variants thereof.

[0069] In some embodiments, the AAV serotype may be, or have, a sequence as described in United States Publication No. US20150159173, the contents of which are herein incorporated by reference in their entirety, such as, but not limited to, AAV2 (SEQ ID NO: 7 and 23 of US20150159173), rh20 (SEQ ID NO: 1 of US20150159173), rh32/33 (SEQ ID NO: 2 of US20150159173), rh39 (SEQ ID NO: 3, 20 and 36 of US20150159173), rh46 (SEQ ID NO: 4 and 22 of US20150159173), rh73 (SEQ ID NO: 5 of US20150159173), rh74 (SEQ ID NO: 6 of US20150159173), AAV6.1 (SEQ ID NO: 29 of US20150159173), rh.8 (SEQ ID NO: 41 of US20150159173), rh.48.1 (SEQ ID NO: 44 of US20150159173), hu.44 (SEQ ID NO: 45 of US20150159173), hu.29 (SEQ ID NO: 42 of US20150159173), hu.48 (SEQ ID NO: 38 of US20150159173), rh54 (SEQ ID NO: 49 of US20150159173), AAV2 (SEQ ID NO: 7 of US20150159173), cy.5 (SEQ ID NO: 8 and 24 of US20150159173), rh.10 (SEQ ID NO: 9 and 25 of US20150159173), rh.13 (SEQ ID NO: 10 and 26 of US20150159173), AAV1 (SEQ ID NO: 11 and 27 of US20150159173), AAV3 (SEQ ID NO: 12 and 28 of US20150159173), AAV6 (SEQ ID NO: 13 and 29 of US20150159173), AAV7 (SEQ ID NO: 14 and 30 of US20150159173), AAV8 (SEQ ID NO: 15 and 31 of US20150159173), hu.13 (SEQ ID NO: 16 and 32 of US20150159173), hu.26 (SEQ ID NO: 17 and 33 of US20150159173), hu.37 (SEQ ID NO: 18 and 34 of US20150159173), hu.53 (SEQ ID NO: 19 and 35 of US20150159173), rh.43 (SEQ ID NO: 21 and 37 of US20150159173), rh2 (SEQ ID NO: 39 of US20150159173), rh.37 (SEQ ID NO: 40 of US20150159173), rh.64 (SEQ ID NO: 43 of US20150159173), rh.48 (SEQ ID NO: 44 of US20150159173), ch.5 (SEQ ID NO 46 of US20150159173), rh.67 (SEQ ID NO: 47 of US20150159173), rh.58 (SEQ ID NO: 48 of US20150159173), or variants thereof including, but not limited to Cy5R1, Cy5R2, Cy5R3, Cy5R4, rh.13R, rh.37R2, rh.2R, rh.8R, rh.48.1, rh.48.2, rh.48.1.2, hu.44R1, hu.44R2, hu.44R3, hu.29R, ch.5R1, rh64R1, rh64R2, AAV6.2, AAV6.1, AAV6.12, hu.48R1, hu.48R2, and hu.48R3.

[0070] In some embodiments, the AAV serotype may be, or have, a sequence as described in U.S. Pat. No. 7,198,951, the contents of which are herein incorporated by reference in their entirety, such as, but not limited to, AAV9 (SEQ ID NO: 1-3 of U.S. Pat. No. 7,198,951), AAV2 (SEQ ID NO: 4 of U.S. Pat. No. 7,198,951), AAV1 (SEQ ID NO: 5 of U.S. Pat. No. 7,198,951), AAV3 (SEQ ID NO: 6 of U.S. Pat. No. 7,198,951), and AAV8 (SEQ ID NO: 7 of U.S. Pat. No. 7,198,951).

[0071] In some embodiments, the AAV serotype may be, or have, a mutation in the AAV9 sequence as described by N Pulicherla et al. (Molecular Therapy 19(6):1070-1078 (2011), herein incorporated by reference in its entirety), such as but not limited to, AAV9.9, AAV9.11, AAV9.13, AAV9.16, AAV9.24, AAV9.45, AAV9.47, AAV9.61, AAV9.68, AAV9.84.

[0072] In some embodiments, the AAV serotype may be, or have, a sequence as described in U.S. Pat. No. 6,156,303, the contents of which are herein incorporated by reference in their entirety, such as, but not limited to, AAV3B (SEQ ID NO: 1 and 10 of U.S. Pat. No. 6,156,303), AAV6 (SEQ ID NO: 2, 7 and 11 of U.S. Pat. No. 6,156,303), AAV2 (SEQ ID NO: 3 and 8 of U.S. Pat. No. 6,156,303), AAV3A (SEQ ID NO: 4 and 9, of U.S. Pat. No. 6,156,303), or derivatives thereof.

[0073] In some embodiments, the AAV serotype may be, or have, a sequence as described in United States Publication No. US20140359799, the contents of which are herein incorporated by reference in their entirety, such as, but not limited to, AAV8 (SEQ ID NO: 1 of US20140359799), AAVDJ (SEQ ID NO: 2 and 3 of US20140359799), or variants thereof.

[0074] In some embodiments, the serotype may be AAVDJ or a variant thereof, such as AAVDJ8 (or AAV-DJ8), as described by Grimm et al. (Journal of Virology 82(12): 5887-5911 (2008), herein incorporated by reference in its entirety). The amino acid sequence of AAVDJ8 may comprise two or more mutations in order to remove the heparin binding domain (HBD). As a non-limiting example, the AAV-DJ sequence described as SEQ ID NO: 1 in U.S. Pat. No. 7,588,772, the contents of which are herein incorporated by reference in their entirety, may comprise two mutations: (1) R587Q where arginine (R; Arg) at amino acid 587 is changed to glutamine (Q; Gln) and (2) R590T where arginine (R; Arg) at amino acid 590 is changed to threonine (T; Thr). As another non-limiting example, the AAVDJ sequence described as SEQ ID NO: 1 in U.S. Pat. No. 7,588,772 may comprise three mutations: (1) K406R where lysine (K; Lys) at amino acid 406 is changed to arginine (R; Arg), (2) R587Q where arginine (R; Arg) at amino acid 587 is changed to glutamine (Q; Gln) and (3) R590T where arginine (R; Arg) at amino acid 590 is changed to threonine (T; Thr).

[0075] In some embodiments, the AAV serotype may be, or have, a sequence of AAV4 as described in International Publication No. WO1998011244, the contents of which are herein incorporated by reference in their entirety, such as, but not limited to AAV4 (SEQ ID NO: 1-20 of WO1998011244).

[0076] In some embodiments, the AAV serotype may be, or have, a mutation in the AAV2 sequence to generate AAV2G9 as described in International Publication No. WO2014144229 and herein incorporated by reference in its entirety.

[0077] In some embodiments, the AAV serotype may be, or have, a sequence as described in International Publication No. WO2005033321, the contents of which are herein incorporated by reference in their entirety, such as, but not limited to AAV3-3 (SEQ ID NO: 217 of WO2005033321), AAV1 (SEQ ID NO: 219 and 202 of WO2005033321), AAV106.1/hu.37 (SEQ ID No: 10 of WO2005033321), AAV114.3/hu.40 (SEQ ID No: 11 of WO2005033321), AAV127.2/hu.41 (SEQ ID NO:6 and 8 of WO2005033321), AAV128.3/hu.44 (SEQ ID No: 81 of WO2005033321), AAV130.4/hu.48 (SEQ ID NO: 78 of WO2005033321), AAV145.1/hu.53 (SEQ ID No: 176 and 177 of WO2005033321), AAV145.6/hu.56 (SEQ ID NO: 168 and 192 of WO2005033321), AAV16.12/hu.11 (SEQ ID NO: 153 and 57 of WO2005033321), AAV16.8/hu.10 (SEQ ID NO: 156 and 56 of WO2005033321), AAV161.10/hu.60 (SEQ ID No: 170 of WO2005033321), AAV161.6/hu.61 (SEQ ID No: 174 of WO2005033321), AAV1-7/rh.48 (SEQ ID NO: 32 of WO2005033321), AAV1-8/rh.49 (SEQ ID NOs: 103 and 25 of WO2005033321), AAV2 (SEQ ID NO: 211 and 221 of WO2005033321), AAV2-15/rh.62 (SEQ ID No: 33 and 114 of WO2005033321), AAV2-3/rh.61 (SEQ ID NO: 21 of WO2005033321), AAV2-4/rh.50 (SEQ ID No: 23 and 108 of WO2005033321), AAV2-5/rh.51 (SEQ ID NO: 104 and 22 of WO2005033321), AAV3.1/hu.6 (SEQ ID NO: 5 and 84 of WO2005033321), AAV3.1/hu.9 (SEQ ID NO: 155 and 58 of WO2005033321), AAV3-11/rh.53 (SEQ ID NO: 186 and 176 of WO2005033321), AAV3-3 (SEQ ID NO: 200 of WO2005033321), AAV33.12/hu.17 (SEQ ID NO:4 of WO2005033321), AAV33.4/hu.15 (SEQ ID No: 50 of WO2005033321), AAV33.8/hu.16 (SEQ ID No: 51 of WO2005033321), AAV3-9/rh.52 (SEQ ID NO: 96 and 18 of WO2005033321), AAV4-19/rh.55 (SEQ ID NO: 117 of WO2005033321), AAV4-4 (SEQ ID NO: 201 and 218 of WO2005033321), AAV4-9/rh.54 (SEQ ID NO: 116 of WO2005033321), AAV5 (SEQ ID NO: 199 and 216 of WO2005033321), AAV52.1/hu.20 (SEQ ID NO: 63 of WO2005033321), AAV52/hu.19 (SEQ ID NO: 133 of WO2005033321), AAV5-22/rh.58 (SEQ ID No: 27 of WO2005033321), AAV5-3/rh.57 (SEQ ID NO: 105 of WO2005033321), AAV5-3/rh.57 (SEQ ID No: 26 of WO2005033321), AAV58.2/hu.25 (SEQ ID No: 49 of WO2005033321), AAV6 (SEQ ID NO: 203 and 220 of WO2005033321), AAV7 (SEQ ID NO: 222 and 213 of WO2005033321), AAV7.3/hu.7 (SEQ ID No: 55 of WO2005033321), AAV8 (SEQ ID NO: 223 and 214 of WO2005033321), AAVH-1/hu.1 (SEQ ID No: 46 of WO2005033321), AAVH-5/hu.3 (SEQ ID No: 44 of WO2005033321), AAVhu.1 (SEQ ID NO: 144 of WO2005033321), AAVhu.10 (SEQ ID NO: 156 of WO2005033321), AAVhu.11 (SEQ ID NO: 153 of WO2005033321), AAVhu.12 (WO2005033321 SEQ ID NO: 59), AAVhu.13 (SEQ ID NO: 129 of WO2005033321), AAVhu.14/AAV9 (SEQ ID NO: 123 and 3 of WO2005033321), AAVhu.15 (SEQ ID NO: 147 of WO2005033321), AAVhu.16 (SEQ ID NO: 148 of WO2005033321), AAVhu.17 (SEQ ID NO: 83 of WO2005033321), AAVhu.18 (SEQ ID NO: 149 of WO2005033321), AAVhu.19 (SEQ ID NO: 133 of WO2005033321), AAVhu.2 (SEQ ID NO: 143 of WO2005033321), AAVhu.20 (SEQ ID NO: 134 of WO2005033321), AAVhu.21 (SEQ ID NO: 135 of WO2005033321), AAVhu.22 (SEQ ID NO: 138 of WO2005033321), AAVhu.23.2 (SEQ ID NO: 137 of WO2005033321), AAVhu.24 (SEQ ID NO: 136 of WO2005033321), AAVhu.25 (SEQ ID NO: 146 of WO2005033321), AAVhu.27 (SEQ ID NO: 140 of WO2005033321), AAVhu.29 (SEQ ID NO: 132 of WO2005033321), AAVhu.3 (SEQ ID NO: 145 of WO2005033321), AAVhu.31 (SEQ ID NO: 121 of WO2005033321), AAVhu.32 (SEQ ID NO: 122 of WO2005033321), AAVhu.34 (SEQ ID NO: 125 of WO2005033321), AAVhu.35 (SEQ ID NO: 164 of WO2005033321), AAVhu.37 (SEQ ID NO: 88 of WO2005033321), AAVhu.39 (SEQ ID NO: 102 of WO2005033321), AAVhu.4 (SEQ ID NO: 141 of WO2005033321), AAVhu.40 (SEQ ID NO: 87 of WO2005033321), AAVhu.41 (SEQ ID NO: 91 of WO2005033321), AAVhu.42 (SEQ ID NO: 85 of WO2005033321), AAVhu.43 (SEQ ID NO: 160 of WO2005033321), AAVhu.44 (SEQ ID NO: 144 of WO2005033321), AAVhu.45 (SEQ ID NO: 127 of WO2005033321), AAVhu.46 (SEQ ID NO: 159 of WO2005033321), AAVhu.47 (SEQ ID NO: 128 of WO2005033321), AAVhu.48 (SEQ ID NO: 157 of WO2005033321), AAVhu.49 (SEQ ID NO: 189 of WO2005033321), AAVhu.51 (SEQ ID NO: 190 of WO2005033321), AAVhu.52 (SEQ ID NO: 191 of WO2005033321), AAVhu.53 (SEQ ID NO: 186 of WO2005033321), AAVhu.54 (SEQ ID NO: 188 of WO2005033321), AAVhu.55 (SEQ ID NO: 187 of WO2005033321), AAVhu.56 (SEQ ID NO: 192 of WO2005033321), AAVhu.57 (SEQ ID NO: 193 of WO2005033321), AAVhu.58 (SEQ ID NO: 194 of WO2005033321), AAVhu.6 (SEQ ID NO: 84 of WO2005033321), AAVhu.60 (SEQ ID NO: 184 of WO2005033321), AAVhu.61 (SEQ ID NO: 185 of WO2005033321), AAVhu.63 (SEQ ID NO: 195 of WO2005033321), AAVhu.64 (SEQ ID NO: 196 of WO2005033321), AAVhu.66 (SEQ ID NO: 197 of WO2005033321), AAVhu.67 (SEQ ID NO: 198 of WO2005033321), AAVhu.7 (SEQ ID NO: 150 of WO2005033321), AAVhu.8 (WO2005033321 SEQ ID NO: 12), AAVhu.9 (SEQ ID NO: 155 of WO2005033321), AAVLG-10/rh.40 (SEQ ID No: 14 of WO2005033321), AAVLG-4/rh.38 (SEQ ID NO: 86 of WO2005033321), AAVLG-4/rh.38 (SEQ ID No: 7 of WO2005033321), AAVN721-8/rh.43 (SEQ ID NO: 163 of WO2005033321), AAVN721-8/rh.43 (SEQ ID No: 43 of WO2005033321), AAVpi.1 (WO2005033321 SEQ ID NO: 28), AAVpi.2 (WO2005033321 SEQ ID NO: 30), AAVpi.3 (WO2005033321 SEQ ID NO: 29), AAVrh.38 (SEQ ID NO: 86 of WO2005033321), AAVrh.40 (SEQ ID NO: 92 of WO2005033321), AAVrh.43 (SEQ ID NO: 163 of WO2005033321), AAVrh.44 (WO2005033321 SEQ ID NO: 34), AAVrh.45 (WO2005033321 SEQ ID NO: 41), AAVrh.47 (WO2005033321 SEQ ID NO: 38), AAVrh.48 (SEQ ID NO: 115 of WO2005033321), AAVrh.49 (SEQ ID NO: 103 of WO2005033321), AAVrh.50 (SEQ ID NO: 108 of WO2005033321), AAVrh.51 (SEQ ID NO: 104 of WO2005033321), AAVrh.52 (SEQ ID NO: 96 of WO2005033321), AAVrh.53 (SEQ ID NO: 97 of WO2005033321), AAVrh.55 (WO2005033321 SEQ ID NO: 37), AAVrh.56 (SEQ ID NO: 152 of WO2005033321), AAVrh.57 (SEQ ID NO: 105 of WO2005033321), AAVrh.58 (SEQ ID NO: 106 of WO2005033321), AAVrh.59 (WO2005033321 SEQ ID NO: 42), AAVrh.60 (WO2005033321 SEQ ID NO: 31), AAVrh.61 (SEQ ID NO: 107 of WO2005033321), AAVrh.62 (SEQ ID NO: 114 of WO2005033321), AAVrh.64 (SEQ ID NO: 99 of WO2005033321), AAVrh.65 (WO2005033321 SEQ ID NO: 35), AAVrh.68 (WO2005033321 SEQ ID NO: 16), AAVrh.69 (WO2005033321 SEQ ID NO: 39), AAVrh.70 (WO2005033321 SEQ ID NO: 20), AAVrh.72 (WO2005033321 SEQ ID NO: 9), or variants thereof including, but not limited to, AAVcy.2, AAVcy.3, AAVcy.4, AAVcy.5, AAVcy.6, AAVrh.12, AAVrh.17, AAVrh.18, AAVrh.19, AAVrh.21, AAVrh.22, AAVrh.23, AAVrh.24, AAVrh.25, AAVrh.25/42 15, AAVrh.31, AAVrh.32, AAVrh.33, AAVrh.34, AAVrh.35, AAVrh.36, AAVrh.37, AAVrh14. Non limiting examples of variants include SEQ ID NO: 13, 15, 17, 19, 24, 36, 40, 45, 47, 48, 51-54, 60-62, 64-77, 79, 80, 82, 89, 90, 93-95, 98, 100, 101-109-113, 118-120, 124, 126, 131, 139, 142, 151,154, 158, 161, 162, 165-183, 202, 204-212, 215, 219, 224-236, of WO2005033321, the contents of which are herein incorporated by reference in their entirety.

[0078] In some embodiments, the AAV serotype may be, or have, a sequence as described in International Publication No. WO2015168666, the contents of which are herein incorporated by reference in their entirety, such as, but not limited to, AAVrh8R (SEQ ID NO: 9 of WO2015168666), AAVrh8R A586R mutant (SEQ ID NO: 10 of WO2015168666), AAVrh8R R533A mutant (SEQ ID NO: 11 of WO2015168666), or variants thereof.

[0079] In some embodiments, the AAV serotype may be, or have, a sequence as described in U.S. Pat. No. 9,233,131, the contents of which are herein incorporated by reference in their entirety, such as, but not limited to, AAVhE1.1 (SEQ ID NO:44 of U.S. Pat. No. 9,233,131), AAVhEr1.5 (SEQ ID NO:45 of U.S. Pat. No. 9,233,131), AAVhER1.14 (SEQ ID NO:46 of U.S. Pat. No. 9,233,131), AAVhEr1.8 (SEQ ID NO:47 of U.S. Pat. No. 9,233,131), AAVhEr1.16 (SEQ ID NO:48 of U.S. Pat. No. 9,233,131), AAVhEr1.18 (SEQ ID NO:49 of U.S. Pat. No. 9,233,131), AAVhEr1.35 (SEQ ID NO:50 of U.S. Pat. No. 9,233,131), AAVhEr1.7 (SEQ ID NO:51 of U.S. Pat. No. 9,233,131), AAVhEr1.36 (SEQ ID NO:52 of U.S. Pat. No. 9,233,131), AAVhEr2.29 (SEQ ID NO:53 of U.S. Pat. No. 9,233,131), AAVhEr2.4 (SEQ ID NO:54 of U.S. Pat. No. 9,233,131), AAVhEr2.16 (SEQ ID NO:55 of U.S. Pat. No. 9,233,131), AAVhEr2.30 (SEQ ID NO:56 of U.S. Pat. No. 9,233,131), AAVhEr2.31 (SEQ ID NO:58 of U.S. Pat. No. 9,233,131), AAVhEr2.36 (SEQ ID NO:57 of U.S. Pat. No. 9,233,131), AAVhER1.23 (SEQ ID NO:53 of U.S. Pat. No. 9,233,131), AAVhEr3.1 (SEQ ID NO:59 of U.S. Pat. No. 9,233,131), AAV2.5T (SEQ ID NO:42 of U.S. Pat. No. 9,233,131), or variants thereof.

[0080] In some embodiments, the AAV serotype may be, or have, a sequence as described in United States Patent Publication No. US20150376607, the contents of which are herein incorporated by reference in their entirety, such as, but not limited to, AAV-PAEC (SEQ ID NO:1 of US20150376607), AAV-LK01 (SEQ ID NO:2 of US20150376607), AAV-LK02 (SEQ ID NO:3 of US20150376607), AAV-LK03 (SEQ ID NO:4 of US20150376607), AAV-LK04 (SEQ ID NO:5 of US20150376607), AAV-LK05 (SEQ ID NO:6 of US20150376607), AAV-LK06 (SEQ ID NO:7 of US20150376607), AAV-LK07 (SEQ ID NO:8 of US20150376607), AAV-LK08 (SEQ ID NO:9 of US20150376607), AAV-LK09 (SEQ ID NO:10 of US20150376607), AAV-LK10 (SEQ ID NO:11 of US20150376607), AAV-LK11 (SEQ ID NO:12 of US20150376607), AAV-LK12 (SEQ ID NO:13 of US20150376607), AAV-LK13 (SEQ ID NO:14 of US20150376607), AAV-LK14 (SEQ ID NO:15 of US20150376607), AAV-LK15 (SEQ ID NO:16 of US20150376607), AAV-LK16 (SEQ ID NO:17 of US20150376607), AAV-LK17 (SEQ ID NO:18 of US20150376607), AAV-LK18 (SEQ ID NO:19 of US20150376607), AAV-LK19 (SEQ ID NO:20 of US20150376607), AAV-PAEC2 (SEQ ID NO:21 of US20150376607), AAV-PAEC4 (SEQ ID NO:22 of US20150376607), AAV-PAEC6 (SEQ ID NO:23 of US20150376607), AAV-PAEC7 (SEQ ID NO:24 of US20150376607), AAV-PAEC8 (SEQ ID NO:25 of US20150376607), AAV-PAEC11 (SEQ ID NO:26 of US20150376607), AAV-PAEC12 (SEQ ID NO:27, of US20150376607), or variants thereof.

[0081] In some embodiments, the AAV serotype may be, or have, a sequence as described in U.S. Pat. No. 9,163,261, the contents of which are herein incorporated by reference in their entirety, such as, but not limited to, AAV-2-pre-miRNA-101 (SEQ ID NO: 1 U.S. Pat. No. 9,163,261), or variants thereof.

[0082] In some embodiments, the AAV serotype may be, or have, a sequence as described in United States Patent Publication No. US20150376240, the contents of which are herein incorporated by reference in their entirety, such as, but not limited to, AAV-8h (SEQ ID NO: 6 of US20150376240), AAV-8b (SEQ ID NO: 5 of US20150376240), AAV-h (SEQ ID NO: 2 of US20150376240), AAV-b (SEQ ID NO: 1 of US20150376240), or variants thereof.

[0083] In some embodiments, the AAV serotype may be, or have, a sequence as described in United States Patent Publication No. US20160017295, the contents of which are herein incorporated by reference in their entirety, such as, but not limited to, AAV SM 10-2 (SEQ ID NO: 22 of US20160017295), AAV Shuffle 100-1 (SEQ ID NO: 23 of US20160017295), AAV Shuffle 100-3 (SEQ ID NO: 24 of US20160017295), AAV Shuffle 100-7 (SEQ ID NO: 25 of US20160017295), AAV Shuffle 10-2 (SEQ ID NO: 34 of US20160017295), AAV Shuffle 10-6 (SEQ ID NO: 35 of US20160017295), AAV Shuffle 10-8 (SEQ ID NO: 36 of US20160017295), AAV Shuffle 100-2 (SEQ ID NO: 37 of US20160017295), AAV SM 10-1 (SEQ ID NO: 38 of US20160017295), AAV SM 10-8 (SEQ ID NO: 39 of US20160017295), AAV SM 100-3 (SEQ ID NO: 40 of US20160017295), AAV SM 100-10 (SEQ ID NO: 41 of US20160017295), or variants thereof.

[0084] In some embodiments, the AAV serotype may be, or have, a sequence as described in United States Patent Publication No. US20150238550, the contents of which are herein incorporated by reference in their entirety, such as, but not limited to, BNP61 AAV (SEQ ID NO: 1 of US20150238550), BNP62 AAV (SEQ ID NO: 3 of US20150238550), BNP63 AAV (SEQ ID NO: 4 of US20150238550), or variants thereof.

[0085] In some embodiments, the AAV serotype may be or may have a sequence as described in United States Patent Publication No. US20150315612, the contents of which are herein incorporated by reference in their entirety, such as, but not limited to, AAVrh.50 (SEQ ID NO: 108 of US20150315612), AAVrh.43 (SEQ ID NO: 163 of US20150315612), AAVrh.62 (SEQ ID NO: 114 of US20150315612), AAVrh.48 (SEQ ID NO: 115 of US20150315612), AAVhu.19 (SEQ ID NO: 133 of US20150315612), AAVhu.11 (SEQ ID NO: 153 of US20150315612), AAVhu.53 (SEQ ID NO: 186 of US20150315612), AAV4-8/rh.64 (SEQ ID No: 15 of US20150315612), AAVLG-9/hu.39 (SEQ ID No: 24 of US20150315612), AAV54.5/hu.23 (SEQ ID No: 60 of US20150315612), AAV54.2/hu.22 (SEQ ID No: 67 of US20150315612), AAV54.7/hu.24 (SEQ ID No: 66 of US20150315612), AAV54.1/hu.21 (SEQ ID No: 65 of US20150315612), AAV54.4R/hu.27 (SEQ ID No: 64 of US20150315612), AAV46.2/hu.28 (SEQ ID No: 68 of US20150315612), AAV46.6/hu.29 (SEQ ID No: 69 of US20150315612), AAV128.1/hu.43 (SEQ ID No: 80 of US20150315612), or variants thereof.

[0086] In some embodiments, the AAV serotype may be, or have, a sequence as described in International Publication No. WO2015121501, the contents of which are herein incorporated by reference in their entirety, such as, but not limited to, true type AAV (ttAAV) (SEQ ID NO: 2 of WO2015121501), “UPenn AAV10” (SEQ ID NO: 8 of WO2015121501), “Japanese AAV10” (SEQ ID NO: 9 of WO2015121501), or variants thereof.

[0087] In one embodiment, the AAV serotype may be an avian AAV (AAAV). The AAAV serotype may be, or have, a sequence as described in U.S. Pat. No. 9,238,800, the contents of which are herein incorporated by reference in their entirety, such as, but not limited to, AAAV (SEQ ID NO: 1, 2, 4, 6, 8, 10, 12, and 14 of U.S. Pat. No. 9,238,800), or variants thereof.

[0088] In one embodiment, the AAV serotype may be a bovine AAV (BAAV). The BAAV serotype may be, or have, a sequence as described in U.S. Pat. No. 9,193,769, the contents of which are herein incorporated by reference in their entirety, such as, but not limited to, BAAV (SEQ ID NO: 1 and 6 of U.S. Pat. No. 9,193,769), or variants thereof. The BAAV serotype may be or have a sequence as described in U.S. Pat. No. 7,427,396, the contents of which are herein incorporated by reference in their entirety, such as, but not limited to, BAAV (SEQ ID NO: 5 and 6 of U.S. Pat. No. 7,427,396), or variants thereof.

[0089] In one embodiment, the AAV serotype may be a caprine AAV. The caprine AAV serotype may be, or have, a sequence as described in U.S. Pat. No. 7,427,396, the contents of which are herein incorporated by reference in their entirety, such as, but not limited to, caprine AAV (SEQ ID NO: 3 of U.S. Pat. No. 7,427,396), or variants thereof.

[0090] In other embodiments the AAV serotype may be engineered as a hybrid AAV from two or more parental serotypes. In one embodiment, the AAV may be AAV2G9 which comprises sequences from AAV2 and AAV9. The AAV2G9 AAV serotype may be, or have, a sequence as described in United States Patent Publication No. US20160017005, the contents of which are herein incorporated by reference in their entirety.

[0091] In one embodiment, the AAV serotype may be a serotype generated by the AAV9 capsid library with mutations in amino acids 390-627 (VP1 numbering) as described by Pulicherla et al. (Molecular Therapy 19(6):1070-1078 (2011), the contents of which are herein incorporated by reference in their entirety. The serotype and corresponding nucleotide and amino acid substitutions may be, but is not limited to, AAV9.1 (G1594C; D532H), AAV6.2 (T1418A and T1436X; V473D and I479K), AAV9.3 (T1238A; F413Y), AAV9.4 (T1250C and A1617T; F417S), AAV9.5 (A1235G, A1314T, A1642G, C1760T; Q412R, T548A, A587V), AAV9.6 (T1231A; F411I), AAV9.9 (G1203A, G1785T; W595C), AAV9.10 (A1500G, T1676C; M559T), AAV9.11 (A1425T, A1702C, A1769T; T568P, Q590L), AAV9.13 (A1369C, A1720T; N457H, T574S), AAV9.14 (T1340A, T1362C, T1560C, G1713A; L447H), AAV9.16 (A1775T; Q592L), AAV9.24 (T1507C, T1521G; W503R), AAV9.26 (A1337G, A1769C; Y446C, Q590P), AAV9.33 (A1667C; D556A), AAV9.34 (A1534G, C1794T; N512D), AAV9.35 (A1289T, T1450A, C1494T, A1515T, C1794A, G1816A; Q430L, Y484N, N98K, V6061), AAV9.40 (A1694T, E565V), AAV9.41 (A1348T, T1362C; T450S), AAV9.44 (A1684C, A1701T, A1737G; N562H, K567N), AAV9.45 (A1492T, C1804T; N498Y, L602F), AAV9.46 (G1441C, T1525C, T1549G; G481R, W509R, L517V), 9.47 (G1241A, G1358A, A1669G, C1745T; S414N, G453D, K557E, T582I), AAV9.48 (C1445T, A1736T; P482L, Q579L), AAV9.50 (A1638T, C1683T, T1805A; Q546H, L602H), AAV9.53 (G1301A, A1405C, C1664T, G1811T; R134Q, S469R, A555V, G604V), AAV9.54 (C1531A, T1609A; L511I, L537M), AAV9.55 (T1605A; F535L), AAV9.58 (C1475T, C1579A; T492I, H527N), AAV.59 (T1336C; Y446H), AAV9.61 (A1493T; N498I), AAV9.64 (C1531A, A1617T; L511I), AAV9.65 (C1335T, T1530C, C1568A; A523D), AAV9.68 (C1510A; P504T), AAV9.80 (G1441A, G481R), AAV9.83 (C1402A, A1500T; P468T, E500D), AAV9.87 (T1464C, T1468C; S490P), AAV9.90 (A1196T; Y399F), AAV9.91 (T1316G, A1583T, C1782G, T1806C; L439R, K528I), AAV9.93 (A1273G, A1421G, A1638C, C1712T, G1732A, A1744T, A1832T; S425G, Q474R, Q546H, P571L, G578R, T582S, D611V), AAV9.94 (A1675T; M559L) and AAV9.95 (T1605A; F535L).

[0092] In some embodiments, the AAV serotype may be, or have, a sequence as described in International Publication No. WO2016049230, the contents of which are herein incorporated by reference in their entirety, such as, but not limited to AAVF1/HSC1 (SEQ ID NO: 2 and 20 of WO2016049230), AAVF2/HSC2 (SEQ ID NO: 3 and 21 of WO2016049230), AAVF3/HSC3 (SEQ ID NO: 5 and 22 of WO2016049230), AAVF4/HSC4 (SEQ ID NO: 6 and 23 of WO2016049230), AAVF5/HSC5 (SEQ ID NO: 11 and 25 of WO2016049230), AAVF6/HSC6 (SEQ ID NO: 7 and 24 of WO2016049230), AAVF7/HSC7 (SEQ ID NO: 8 and 27 of WO2016049230), AAVF8/HSC8 (SEQ ID NO: 9 and 28 of WO2016049230), AAVF9/HSC9 (SEQ ID NO: 10 and 29 of WO2016049230), AAVF11/HSC11 (SEQ ID NO: 4 and 26 of WO2016049230), AAVF12/HSC12 (SEQ ID NO: 12 and 30 of WO2016049230), AAVF13/HSC13 (SEQ ID NO: 14 and 31 of WO2016049230), AAVF14/HSC14 (SEQ ID NO: 15 and 32 of WO2016049230), AAVF15/HSC15 (SEQ ID NO: 16 and 33 of WO2016049230), AAVF16/HSC16 (SEQ ID NO: 17 and 34 of WO2016049230), AAVF17/HSC17 (SEQ ID NO: 13 and 35 of WO2016049230), or variants or derivatives thereof.

[0093] In some embodiments, the AAV serotype may be, or have, a sequence as described in U.S. Pat. No. 8,734,809, the contents of which are herein incorporated by reference in their entirety, such as, but not limited to, AAV CBr-E1 (SEQ ID NO: 13 and 87 of U.S. Pat. No. 8,734,809), AAV CBr-E2 (SEQ ID NO: 14 and 88 of U.S. Pat. No. 8,734,809), AAV CBr-E3 (SEQ ID NO: 15 and 89 of U.S. Pat. No. 8,734,809), AAV CBr-E4 (SEQ ID NO: 16 and 90 of U.S. Pat. No. 8,734,809), AAV CBr-E5 (SEQ ID NO: 17 and 91 of U.S. Pat. No. 8,734,809), AAV CBr-e5 (SEQ ID NO: 18 and 92 of U.S. Pat. No. 8,734,809), AAV CBr-E6 (SEQ ID NO: 19 and 93 of U.S. Pat. No. 8,734,809), AAV CBr-E7 (SEQ ID NO: 20 and 94 of U.S. Pat. No. 8,734,809), AAV CBr-E8 (SEQ ID NO: 21 and 95 of U.S. Pat. No. 8,734,809), AAV CLv-D1 (SEQ ID NO: 22 and 96 of U.S. Pat. No. 8,734,809), AAV CLv-D2 (SEQ ID NO: 23 and 97 of U.S. Pat. No. 8,734,809), AAV CLv-D3 (SEQ ID NO: 24 and 98 of U.S. Pat. No. 8,734,809), AAV CLv-D4 (SEQ ID NO: 25 and 99 of U.S. Pat. No. 8,734,809), AAV CLv-D5 (SEQ ID NO: 26 and 100 of U.S. Pat. No. 8,734,809), AAV CLv-D6 (SEQ ID NO: 27 and 101 of U.S. Pat. No. 8,734,809), AAV CLv-D7 (SEQ ID NO: 28 and 102 of U.S. Pat. No. 8,734,809), AAV CLv-D8 (SEQ ID NO: 29 and 103 of U.S. Pat. No. 8,734,809), AAV CLv-E1 (SEQ ID NO: 13 and 87 of U.S. Pat. No. 8,734,809), AAV CLv-R1 (SEQ ID NO: 30 and 104 of U.S. Pat. No. 8,734,809), AAV CLv-R2 (SEQ ID NO: 31 and 105 of U.S. Pat. No. 8,734,809), AAV CLv-R3 (SEQ ID NO: 32 and 106 of U.S. Pat. No. 8,734,809), AAV CLv-R4 (SEQ ID NO: 33 and 107 of U.S. Pat. No. 8,734,809), AAV CLv-R5 (SEQ ID NO: 34 and 108 of U.S. Pat. No. 8,734,809), AAV CLv-R6 (SEQ ID NO: 35 and 109 of U.S. Pat. No. 8,734,809), AAV CLv-R7 (SEQ ID NO: 36 and 110 of U.S. Pat. No. 8,734,809), AAV CLv-R8 (SEQ ID NO: X and X of U.S. Pat. No. 8,734,809), AAV CLv-R9 (SEQ ID NO: X and X of U.S. Pat. No. 8,734,809), AAV CLg-F1 (SEQ ID NO: 39 and 113 of U.S. Pat. No. 8,734,809), AAV CLg-F2 (SEQ ID NO: 40 and 114 of U.S. Pat. No. 8,734,809), AAV CLg-F3 (SEQ ID NO: 41 and 115 of U.S. Pat. No. 8,734,809), AAV CLg-F4 (SEQ ID NO: 42 and 116 of U.S. Pat. No. 8,734,809), AAV CLg-F5 (SEQ ID NO: 43 and 117 of U.S. Pat. No. 8,734,809), AAV CLg-F6 (SEQ ID NO: 43 and 117 of U.S. Pat. No. 8,734,809), AAV CLg-F7 (SEQ ID NO: 44 and 118 of U.S. Pat. No. 8,734,809), AAV CLg-F8 (SEQ ID NO: 43 and 117 of U.S. Pat. No. 8,734,809), AAV CSp-1 (SEQ ID NO: 45 and 119 of U.S. Pat. No. 8,734,809), AAV CSp-10 (SEQ ID NO: 46 and 120 of U.S. Pat. No. 8,734,809), AAV CSp-11 (SEQ ID NO: 47 and 121 of U.S. Pat. No. 8,734,809), AAV CSp-2 (SEQ ID NO: 48 and 122 of U.S. Pat. No. 8,734,809), AAV CSp-3 (SEQ ID NO: 49 and 123 of U.S. Pat. No. 8,734,809), AAV CSp-4 (SEQ ID NO: 50 and 124 of U.S. Pat. No. 8,734,809), AAV CSp-6 (SEQ ID NO: 51 and 125 of U.S. Pat. No. 8,734,809), AAV CSp-7 (SEQ ID NO: 52 and 126 of U.S. Pat. No. 8,734,809), AAV CSp-8 (SEQ ID NO: 53 and 127 of U.S. Pat. No. 8,734,809), AAV CSp-9 (SEQ ID NO: 54 and 128 of U.S. Pat. No. 8,734,809), AAV CHt-2 (SEQ ID NO: 55 and 129 of U.S. Pat. No. 8,734,809), AAV CHt-3 (SEQ ID NO: 56 and 130 of U.S. Pat. No. 8,734,809), AAV CKd-1 (SEQ ID NO: 57 and 131 of U.S. Pat. No. 8,734,809), AAV CKd-10 (SEQ ID NO: 58 and 132 of U.S. Pat. No. 8,734,809), AAV CKd-2 (SEQ ID NO: 59 and 133 of U.S. Pat. No. 8,734,809), AAV CKd-3 (SEQ ID NO: 60 and 134 of U.S. Pat. No. 8,734,809), AAV CKd-4 (SEQ ID NO: 61 and 135 of U.S. Pat. No. 8,734,809), AAV CKd-6 (SEQ ID NO: 62 and 136 of U.S. Pat. No. 8,734,809), AAV CKd-7 (SEQ ID NO: 63 and 137 of U.S. Pat. No. 8,734,809), AAV CKd-8 (SEQ ID NO: 64 and 138 of U.S. Pat. No. 8,734,809), AAV CLv-1 (SEQ ID NO: 35 and 139 of U.S. Pat. No. 8,734,809), AAV CLv-12 (SEQ ID NO: 66 and 140 of U.S. Pat. No. 8,734,809), AAV CLv-13 (SEQ ID NO: 67 and 141 of U.S. Pat. No. 8,734,809), AAV CLv-2 (SEQ ID NO: 68 and 142 of U.S. Pat. No. 8,734,809), AAV CLv-3 (SEQ ID NO: 69 and 143 of U.S. Pat. No. 8,734,809), AAV CLv-4 (SEQ ID NO: 70 and 144 of U.S. Pat. No. 8,734,809), AAV CLv-6 (SEQ ID NO: 71 and 145 of U.S. Pat. No. 8,734,809), AAV CLv-8 (SEQ ID NO: 72 and 146 of U.S. Pat. No. 8,734,809), AAV CKd-B1 (SEQ ID NO: 73 and 147 of U.S. Pat. No. 8,734,809), AAV CKd-B2 (SEQ ID NO: 74 and 148 of U.S. Pat. No. 8,734,809), AAV CKd-B3 (SEQ ID NO: 75 and 149 of U.S. Pat. No. 8,734,809), AAV CKd-B4 (SEQ ID NO: 76 and 150 of U.S. Pat. No. 8,734,809), AAV CKd-B5 (SEQ ID NO: 77 and 151 of U.S. Pat. No. 8,734,809), AAV CKd-B6 (SEQ ID NO: 78 and 152 of U.S. Pat. No. 8,734,809), AAV CKd-B7 (SEQ ID NO: 79 and 153 of U.S. Pat. No. 8,734,809), AAV CKd-B8 (SEQ ID NO: 80 and 154 of U.S. Pat. No. 8,734,809), AAV CKd-H1 (SEQ ID NO: 81 and 155 of U.S. Pat. No. 8,734,809), AAV CKd-H2 (SEQ ID NO: 82 and 156 of U.S. Pat. No. 8,734,809), AAV CKd-H3 (SEQ ID NO: 83 and 157 of U.S. Pat. No. 8,734,809), AAV CKd-H4 (SEQ ID NO: 84 and 158 of U.S. Pat. No. 8,734,809), AAV CKd-H5 (SEQ ID NO: 85 and 159 of U.S. Pat. No. 8,734,809), AAV CKd-H6 (SEQ ID NO: 77 and 151 of U.S. Pat. No. 8,734,809), AAV CHt-1 (SEQ ID NO: 86 and 160 of U.S. Pat. No. 8,734,809), AAV CLv1-1 (SEQ ID NO: 171 of U.S. Pat. No. 8,734,809), AAV CLv1-2 (SEQ ID NO: 172 of U.S. Pat. No. 8,734,809), AAV CLv1-3 (SEQ ID NO: 173 of U.S. Pat. No. 8,734,809), AAV CLv1-4 (SEQ ID NO: 174 of U.S. Pat. No. 8,734,809), AAV Clv1-7 (SEQ ID NO: 175 of U.S. Pat. No. 8,734,809), AAV Clv1-8 (SEQ ID NO: 176 of U.S. Pat. No. 8,734,809), AAV Clv1-9 (SEQ ID NO: 177 of U.S. Pat. No. 8,734,809), AAV Clv1-10 (SEQ ID NO: 178 of U.S. Pat. No. 8,734,809), AAV.VR-355 (SEQ ID NO: 181 of U.S. Pat. No. 8,734,809), AAV.hu.48R3 (SEQ ID NO: 183 of U.S. Pat. No. 8,734,809), or variants or derivatives thereof.

[0094] In some embodiments, the AAV serotype may be, or have, a sequence as described in International Publication No. WO2016065001, the contents of which are herein incorporated by reference in their entirety, such as, but not limited to AAV CHt-P2 (SEQ ID NO: 1 and 51 of WO2016065001), AAV CHt-P5 (SEQ ID NO: 2 and 52 of WO2016065001), AAV CHt-P9 (SEQ ID NO: 3 and 53 of WO2016065001), AAV CBr-7.1 (SEQ ID NO: 4 and 54 of WO2016065001), AAV CBr-7.2 (SEQ ID NO: 5 and 55 of WO2016065001), AAV CBr-7.3 (SEQ ID NO: 6 and 56 of WO2016065001), AAV CBr-7.4 (SEQ ID NO: 7 and 57 of WO2016065001), AAV CBr-7.5 (SEQ ID NO: 8 and 58 of WO2016065001), AAV CBr-7.7 (SEQ ID NO: 9 and 59 of WO2016065001), AAV CBr-7.8 (SEQ ID NO: 10 and 60 of WO2016065001), AAV CBr-7.10 (SEQ ID NO: 11 and 61 of WO2016065001), AAV CKd-N3 (SEQ ID NO: 12 and 62 of WO2016065001), AAV CKd-N4 (SEQ ID NO: 13 and 63 of WO2016065001), AAV CKd-N9 (SEQ ID NO: 14 and 64 of WO2016065001), AAV CLv-L4 (SEQ ID NO: 15 and 65 of WO2016065001), AAV CLv-L5 (SEQ ID NO: 16 and 66 of WO2016065001), AAV CLv-L6 (SEQ ID NO: 17 and 67 of WO2016065001), AAV CLv-K1 (SEQ ID NO: 18 and 68 of WO2016065001), AAV CLv-K3 (SEQ ID NO: 19 and 69 of WO2016065001), AAV CLv-K6 (SEQ ID NO: 20 and 70 of WO2016065001), AAV CLv-M1 (SEQ ID NO: 21 and 71 of WO2016065001), AAV CLv-M11 (SEQ ID NO: 22 and 72 of WO2016065001), AAV CLv-M2 (SEQ ID NO: 23 and 73 of WO2016065001), AAV CLv-M5 (SEQ ID NO: 24 and 74 of WO2016065001), AAV CLv-M6 (SEQ ID NO: 25 and 75 of WO2016065001), AAV CLv-M7 (SEQ ID NO: 26 and 76 of WO2016065001), AAV CLv-M8 (SEQ ID NO: 27 and 77 of WO2016065001), AAV CLv-M9 (SEQ ID NO: 28 and 78 of WO2016065001), AAV CHt-P1 (SEQ ID NO: 29 and 79 of WO2016065001), AAV CHt-P6 (SEQ ID NO: 30 and 80 of WO2016065001), AAV CHt-P8 (SEQ ID NO: 31 and 81 of WO2016065001), AAV CHt-6.1 (SEQ ID NO: 32 and 82 of WO2016065001), AAV CHt-6.10 (SEQ ID NO: 33 and 83 of WO2016065001), AAV CHt-6.5 (SEQ ID NO: 34 and 84 of WO2016065001), AAV CHt-6.6 (SEQ ID NO: 35 and 85 of WO2016065001), AAV CHt-6.7 (SEQ ID NO: 36 and 86 of WO2016065001), AAV CHt-6.8 (SEQ ID NO: 37 and 87 of WO2016065001), AAV CSp-8.10 (SEQ ID NO: 38 and 88 of WO2016065001), AAV CSp-8.2 (SEQ ID NO: 39 and 89 of WO2016065001), AAV CSp-8.4 (SEQ ID NO: 40 and 90 of WO2016065001), AAV CSp-8.5 (SEQ ID NO: 41 and 91 of WO2016065001), AAV CSp-8.6 (SEQ ID NO: 42 and 92 of WO2016065001), AAV CSp-8.7 (SEQ ID NO: 43 and 93 of WO2016065001), AAV CSp-8.8 (SEQ ID NO: 44 and 94 of WO2016065001), AAV CSp-8.9 (SEQ ID NO: 45 and 95 of WO2016065001), AAV CBr-B7.3 (SEQ ID NO: 46 and 96 of WO2016065001), AAV CBr-B7.4 (SEQ ID NO: 47 and 97 of WO2016065001), AAV3B (SEQ ID NO: 48 and 98 of WO2016065001), AAV4 (SEQ ID NO: 49 and 99 of WO2016065001), AAV5 (SEQ ID NO: 50 and 100 of WO2016065001), or variants or derivatives thereof.

[0095] In one embodiment, the AAV particle may utilize or be based on a serotype comprising at least one AAV capsid CD8+ T-cell epitope. As a non-limiting example, the serotype may be AAV1, AAV2 or AAV8.

[0096] In one embodiment the AAV serotype may comprise an AAV9 capsid with a tyrosine to phenylalanine substitution at position 446 of the AAV9 capsid protein sequence, as described in Lee, N.C., et al., 2015 Benefits of neuronal preferential systemic gene therapy for neurotransmitter deficiency. Mol. Ther. Vol. 23(10), 1572-1581, the contents of which are herein incorporated by reference in their entirety.

[0097] In one embodiment, the AAV particle of the present disclosure may be an AAV2/9, wherein the ITRs are derived from AAV2 and the capsid from AAV9.

[0098] In one embodiment, the AAV particle of the present disclosure may be an AAV3/9, wherein the ITRs are derived from AAV3 and the capsid from AAV9.

[0099] The AAV particle of the present disclosure may comprise any combination of ITR and capsid to generate a pseudotyped virus.

[0100] In one embodiment, the AAV particle may utilize or be based on a serotype selected from any of those found in Table 1.

[0101] In one embodiment, the AAV particle may be generated as a hybrid or pseudotyped AAV from two or more serotypes described in Table 1. As a non-limiting example, the ITRs may be from a first serotype in Table 1 and the capsid may be from a second serotype in Table 1.

[0102] In one embodiment, the AAV particle may utilize or be based on a sequence, fragment or variant thereof, of the sequences in Table 1.

[0103] In one embodiment, the AAV particle may utilize or be based on a sequence, fragment or variant as described in Table 1.

TABLE 1
AAV Serotypes

| Serotype | SEQ ID NO | Reference Information |
|---|---|---|
| AAV1 | 25 | US20150159173 SEQ ID NO: 11, US20150315612 SEQ |
| | | ID NO: 202 |
| AAV1 | 26 | US20160017295 SEQ ID NO: 1, US20030138772 SEQ |
| | | ID NO: 64, US20150159173 SEQ ID NO: 27, |
| | | US20150315612 SEQ ID NO: 219, U.S. Pat. No. 7,198,951 SEQ ID |
| | | NO: 5 |
| AAV1 | 27 | US20030138772 SEQ ID NO: 6 |
| AAV1.3 | 28 | US20030138772 SEQ ID NO: 14 |
| AAV10 | 29 | US20030138772 SEQ ID NO: 117 |
| AAV10 | 30 | WO2015121501 SEQ ID NO: 9 |
| AAV10 | 31 | WO2015121501 SEQ ID NO: 8 |
| AAV11 | 32 | US20030138772 SEQ ID NO: 118 |
| AAV12 | 33 | US20030138772 SEQ ID NO: 119 |
| AAV2 | 34 | US20150159173 SEQ ID NO: 7, US20150315612 SEQ |
| | | ID NO: 211 |
| AAV2 | 35 | US20030138772 SEQ ID NO: 70, US20150159173 SEQ |
| | | ID NO: 23, US20150315612 SEQ ID NO: 221, |
| | | US20160017295 SEQ ID NO: 2, U.S. Pat. No. 6,156,303 SEQ ID |
| | | NO: 4, U.S. Pat. No. 7,198,951 SEQ ID NO: 4, WO2015121501 |
| | | SEQ ID NO: 1 |
| AAV2 | 36 | U.S. Pat. No. 6,156,303 SEQ ID NO: 8 |
| AAV2 | 37 | US20030138772 SEQ ID NO: 7 |
| AAV2 | 38 | U.S. Pat. No. 6,156,303 SEQ ID NO: 3 |
| AAV2.5T | 39 | U.S. Pat. No. 9,233,131 SEQ ID NO: 42 |
| AAV223.10 | 40 | US20030138772 SEQ ID NO: 75 |
| AAV223.2 | 41 | US20030138772 SEQ ID NO: 49 |
| AAV223.2 | 42 | US20030138772 SEQ ID NO: 76 |
| AAV223.4 | 43 | US20030138772 SEQ ID NO: 50 |
| AAV223.4 | 44 | US20030138772 SEQ ID NO: 73 |
| AAV223.5 | 45 | US20030138772 SEQ ID NO: 51 |
| AAV223.5 | 46 | US20030138772 SEQ ID NO: 74 |
| AAV223.6 | 47 | US20030138772 SEQ ID NO: 52 |
| AAV223.6 | 48 | US20030138772 SEQ ID NO: 78 |
| AAV223.7 | 49 | US20030138772 SEQ ID NO: 53 |
| AAV223.7 | 50 | US20030138772 SEQ ID NO: 77 |
| AAV29.3 | 51 | US20030138772 SEQ ID NO: 82 |
| AAV29.4 | 52 | US20030138772 SEQ ID NO: 12 |
| AAV29.5 | 53 | US20030138772 SEQ ID NO: 83 |
| AAV29.5 (AAVbb.2) | 54 | US20030138772 SEQ ID NO: 13 |
| AAV3 | 55 | US20150159173 SEQ ID NO: 12 |
| AAV3 | 56 | US20030138772 SEQ ID NO: 71, US20150159173 SEQ |
| | | ID NO: 28, US20160017295 SEQ ID NO: 3, |
| | | U.S. Pat. No. 7,198,951 SEQ ID NO: 6 |
| AAV3 | 57 | US20030138772 SEQ ID NO: 8 |
| AAV3.3b | 58 | US20030138772 SEQ ID NO: 72 |
| AAV3-3 | 59 | US20150315612 SEQ ID NO: 200 |
| AAV3-3 | 60 | US20150315612 SEQ ID NO: 217 |
| AAV3a | 61 | U.S. Pat. No. 6,156,303 SEQ ID NO: 5 |
| AAV3a | 62 | U.S. Pat. No. 6,156,303 SEQ ID NO: 9 |
| AAV3b | 63 | U.S. Pat. No. 6,156,303 SEQ ID NO: 6 |
| AAV3b | 64 | U.S. Pat. No. 6,156,303 SEQ ID NO: 10 |
| AAV3b | 65 | U.S. Pat. No. 6,156,303 SEQ ID NO: 1 |
| AAV4 | 66 | US20140348794 SEQ ID NO: 17 |
| AAV4 | 67 | US20140348794 SEQ ID NO: 5 |
| AAV4 | 68 | US20140348794 SEQ ID NO: 3 |
| AAV4 | 69 | US20140348794 SEQ ID NO: 14 |
| AAV4 | 70 | US20140348794 SEQ ID NO: 15 |
| AAV4 | 71 | US20140348794 SEQ ID NO: 19 |
| AAV4 | 72 | US20140348794 SEQ ID NO: 12 |
| AAV4 | 73 | US20140348794 SEQ ID NO: 13 |
| AAV4 | 74 | US20140348794 SEQ ID NO: 7 |
| AAV4 | 75 | US20140348794 SEQ ID NO: 8 |
| AAV4 | 76 | US20140348794 SEQ ID NO: 9 |
| AAV4 | 77 | US20140348794 SEQ ID NO: 2 |
| AAV4 | 78 | US20140348794 SEQ ID NO: 10 |
| AAV4 | 79 | US20140348794 SEQ ID NO: 11 |
| AAV4 | 80 | US20140348794 SEQ ID NO: 18 |
| AAV4 | 81 | US20030138772 SEQ ID NO: 63, US20160017295 SEQ |
| | | ID NO: 4, US20140348794 SEQ ID NO: 4 |
| AAV4 | 82 | US20140348794 SEQ ID NO: 16 |
| AAV4 | 83 | US20140348794 SEQ ID NO: 20 |
| AAV4 | 84 | US20140348794 SEQ ID NO: 6 |
| AAV4 | 85 | US20140348794 SEQ ID NO: 1 |
| AAV42.2 | 86 | US20030138772 SEQ ID NO: 9 |
| AAV42.2 | 87 | US20030138772 SEQ ID NO: 102 |
| AAV42.3b | 88 | US20030138772 SEQ ID NO: 36 |
| AAV42.3B | 89 | US20030138772 SEQ ID NO: 107 |
| AAV42.4 | 90 | US20030138772 SEQ ID NO: 33 |
| AAV42.4 | 91 | US20030138772 SEQ ID NO: 88 |
| AAV42.8 | 92 | US20030138772 SEQ ID NO: 27 |
| AAV42.8 | 93 | US20030138772 SEQ ID NO: 85 |
| AAV43.1 | 94 | US20030138772 SEQ ID NO: 39 |
| AAV43.1 | 95 | US20030138772 SEQ ID NO: 92 |
| AAV43.12 | 96 | US20030138772 SEQ ID NO: 41 |
| AAV43.12 | 97 | US20030138772 SEQ ID NO: 93 |
| AAV43.20 | 98 | US20030138772 SEQ ID NO: 42 |
| AAV43.20 | 99 | US20030138772 SEQ ID NO: 99 |
| AAV43.21 | 100 | US20030138772 SEQ ID NO: 43 |
| AAV43.21 | 101 | US20030138772 SEQ ID NO: 96 |
| AAV43.23 | 102 | US20030138772 SEQ ID NO: 44 |
| AAV43.23 | 103 | US20030138772 SEQ ID NO: 98 |
| AAV43.25 | 104 | US20030138772 SEQ ID NO: 45 |
| AAV43.25 | 105 | US20030138772 SEQ ID NO: 97 |
| AAV43.5 | 106 | US20030138772 SEQ ID NO: 40 |
| AAV43.5 | 107 | US20030138772 SEQ ID NO: 94 |
| AAV4-4 | 108 | US20150315612 SEQ ID NO: 201 |
| AAV4-4 | 109 | US20150315612 SEQ ID NO: 218 |
| AAV44.1 | 110 | US20030138772 SEQ ID NO: 46 |
| AAV44.1 | 111 | US20030138772 SEQ ID NO: 79 |
| AAV44.5 | 112 | US20030138772 SEQ ID NO: 47 |
| AAV44.5 | 113 | US20030138772 SEQ ID NO: 80 |
| AAV4407 | 114 | US20150315612 SEQ ID NO: 90 |
| AAV5 | 115 | U.S. Pat. No. 7,427,396 SEQ ID NO: 1 |
| AAV5 | 116 | US20030138772 SEQ ID NO: 114 |
| AAV5 | 117 | US20160017295 SEQ ID NO: 5, U.S. Pat. No. 7,427,396 SEQ ID |
| | | NO: 2, US20150315612 SEQ ID NO: 216 |
| AAV5 | 118 | US20150315612 SEQ ID NO: 199 |
| AAV6 | 119 | US20150159173 SEQ ID NO: 13 |
| AAV6 | 120 | US20030138772 SEQ ID NO: 65, US20150159173 SEQ |
| | | ID NO: 29, US20160017295 SEQ ID NO: 6, |
| | | U.S. Pat. No. 6,156,303 SEQ ID NO: 7 |
| AAV6 | 121 | U.S. Pat. No. 6,156,303 SEQ ID NO: 11 |
| AAV6 | 122 | U.S. Pat. No. 6,156,303 SEQ ID NO: 2 |
| AAV6 | 123 | US20150315612 SEQ ID NO: 203 |
| AAV6 | 124 | US20150315612 SEQ ID NO: 220 |
| AAV6.1 | 125 | US20150159173 |
| AAV6.12 | 126 | US20150159173 |
| AAV6.2 | 127 | US20150159173 |
| AAV7 | 128 | US20150159173 SEQ ID NO: 14 |
| AAV7 | 129 | US20150315612 SEQ ID NO: 183 |
| AAV7 | 130 | US20030138772 SEQ ID NO: 2, US20150159173 SEQ |
| | | ID NO: 30, US20150315612 SEQ ID NO: 181, |
| | | US20160017295 SEQ ID NO: 7 |
| AAV7 | 131 | U.S. Pat. No. 20030138772 SEQ ID NO: 3 |
| AAV7 | 132 | US20030138772 SEQ ID NO: 1, US20150315612 SEQ |
| | | ID NO: 180 |
| AAV7 | 133 | US20150315612 SEQ ID NO: 213 |
| AAV7 | 134 | US20150315612 SEQ ID NO: 222 |
| AAV8 | 135 | US20150159173 SEQ ID NO: 15 |
| AAV8 | 136 | US20150376240 SEQ ID NO: 7 |
| AAV8 | 137 | US20030138772 SEQ ID NO: 4, US20150315612 SEQ |
| | | ID NO: 182 |
| AAV8 | 138 | US20030138772 SEQ ID NO: 95, US20140359799 SEQ |
| | | ID NO: 1, US20150159173 SEQ ID NO: 31, |
| | | US20160017295 SEQ ID NO: 8, U.S. Pat. No. 7,198,951 SEQ ID |
| | | NO: 7, US20150315612 SEQ ID NO: 223 |
| AAV8 | 139 | US20150376240 SEQ ID NO: 8 |
| AAV8 | 140 | US20150315612 SEQ ID NO: 214 |
| AAV-8b | 141 | US20150376240 SEQ ID NO: 5 |
| AAV-8b | 142 | US20150376240 SEQ ID NO: 3 |
| AAV-8h | 143 | US20150376240 SEQ ID NO: 6 |
| AAV-8h | 144 | US20150376240 SEQ ID NO: 4 |
| AAV9 | 145 | US20030138772 SEQ ID NO: 5 |
| AAV9 | 146 | U.S. Pat. No. 7,198,951 SEQ ID NO: 1 |
| AAV9 | 147 | US20160017295 SEQ ID NO: 9 |
| AAV9 | 148 | US20030138772 SEQ ID NO: 100, U.S. Pat. No. 7,198,951 SEQ ID |
| | | NO: 2 |
| AAV9 | 149 | U.S. Pat. No. 7,198,951 SEQ ID NO: 3 |
| AAV9 (AAVhu.14) | 150 | US20150315612 SEQ ID NO: 3 |
| AAV9 (AAVhu.14) | 151 | US20150315612 SEQ ID NO: 123 |
| AAVA3.1 | 152 | US20030138772 SEQ ID NO: 120 |
| AAVA3.3 | 153 | US20030138772 SEQ ID NO: 57 |
| AAVA3.3 | 154 | US20030138772 SEQ ID NO: 66 |
| AAVA3.4 | 155 | US20030138772 SEQ ID NO: 54 |
| AAVA3.4 | 156 | US20030138772 SEQ ID NO: 68 |
| AAVA3.5 | 157 | US20030138772 SEQ ID NO: 55 |
| AAVA3.5 | 158 | US20030138772 SEQ ID NO: 69 |
| AAVA3.7 | 159 | US20030138772 SEQ ID NO: 56 |
| AAVA3.7 | 160 | US20030138772 SEQ ID NO: 67 |
| AAV29.3 (AAVbb.1) | 161 | US20030138772 SEQ ID NO: 11 |
| AAVC2 | 162 | US20030138772 SEQ ID NO: 61 |
| AAVCh.5 | 163 | US20150159173 SEQ ID NO: 46, US20150315612 SEQ |
| | | ID NO: 234 |
| AAVcy.2 (AAV13.3) | 164 | US20030138772 SEQ ID NO: 15 |
| AAV24.1 | 165 | US20030138772 SEQ ID NO: 101 |
| AAVcy.3 (AAV24.1) | 166 | US20030138772 SEQ ID NO: 16 |
| AAV27.3 | 167 | US20030138772 SEQ ID NO: 104 |
| AAVcy.4 (AAV27.3) | 168 | US20030138772 SEQ ID NO: 17 |
| AAVcy.5 | 169 | US20150315612 SEQ ID NO: 227 |
| AAV7.2 | 170 | US20030138772 SEQ ID NO: 103 |
| AAVcy.5 (AAV7.2) | 171 | US20030138772 SEQ ID NO: 18 |
| AAV16.3 | 172 | US20030138772 SEQ ID NO: 105 |
| AAVcy.6 (AAV16.3) | 173 | US20030138772 SEQ ID NO: 10 |
| AAVcy.5 | 174 | US20150159173 SEQ ID NO: 8 |
| AAVcy.5 | 175 | US20150159173 SEQ ID NO: 24 |
| AAVCy.5R1 | 176 | US20150159173 |
| AAVCy.5R2 | 177 | US20150159173 |
| AAVCy.5R3 | 178 | US20150159173 |
| AAVCy.5R4 | 179 | US20150159173 |
| AAVDJ | 180 | US20140359799 SEQ ID NO: 3, U.S. Pat. No. 7,588,772 SEQ ID |
| | | NO: 2 |
| AAVDJ | 181 | US20140359799 SEQ ID NO: 2, U.S. Pat. No. 7,588,772 SEQ ID |
| | | NO: 1 |
| AAVDJ-8 | 182 | U.S. Pat. No. 7,588,772; Grimm et al 2008 |
| AAVDJ-8 | 183 | U.S. Pat. No. 7,588,772; Grimm et al 2008 |
| AAVF5 | 184 | US20030138772 SEQ ID NO: 110 |
| AAVH2 | 185 | US20030138772 SEQ ID NO: 26 |
| AAVH6 | 186 | US20030138772 SEQ ID NO: 25 |
| AAVhE1.1 | 187 | U.S. Pat. No. 9,233,131 SEQ ID NO: 44 |
| AAVhEr1.14 | 188 | U.S. Pat. No. 9,233,131 SEQ ID NO: 46 |
| AAVhEr1.16 | 189 | U.S. Pat. No. 9,233,131 SEQ ID NO: 48 |
| AAVhEr1.18 | 190 | U.S. Pat. No. 9,233,131 SEQ ID NO: 49 |
| AAVhEr1.23 (AAVhEr2.29) | 191 | U.S. Pat. No. 9,233,131 SEQ ID NO: 53 |
| AAVhEr1.35 | 192 | U.S. Pat. No. 9,233,131 SEQ ID NO: 50 |
| AAVhEr1.36 | 193 | U.S. Pat. No. 9,233,131 SEQ ID NO: 52 |
| AAVhEr1.5 | 194 | U.S. Pat. No. 9,233,131 SEQ ID NO: 45 |
| AAVhEr1.7 | 195 | U.S. Pat. No. 9,233,131 SEQ ID NO: 51 |
| AAVhEr1.8 | 196 | U.S. Pat. No. 9,233,131 SEQ ID NO: 47 |
| AAVhEr2.16 | 197 | U.S. Pat. No. 9,233,131 SEQ ID NO: 55 |
| AAVhEr2.30 | 198 | U.S. Pat. No. 9,233,131 SEQ ID NO: 56 |
| AAVhEr2.31 | 199 | U.S. Pat. No. 9,233,131 SEQ ID NO: 58 |
| AAVhEr2.36 | 200 | U.S. Pat. No. 9,233,131 SEQ ID NO: 57 |
| AAVhEr2.4 | 201 | U.S. Pat. No. 9,233,131 SEQ ID NO: 54 |
| AAVhEr3.1 | 202 | U.S. Pat. No. 9,233,131 SEQ ID NO: 59 |
| AAVhu.1 | 203 | US20150315612 SEQ ID NO: 46 |
| AAVhu.1 | 204 | US20150315612 SEQ ID NO: 144 |
| AAVhu.10 (AAV16.8) | 205 | US20150315612 SEQ ID NO: 56 |
| AAVhu.10 (AAV16.8) | 206 | US20150315612 SEQ ID NO: 156 |
| AAVhu.11 (AAV16.12) | 207 | US20150315612 SEQ ID NO: 57 |
| AAVhu.11 (AAV16.12) | 208 | US20150315612 SEQ ID NO: 153 |
| AAVhu.12 | 209 | US20150315612 SEQ ID NO: 59 |
| AAVhu.12 | 210 | US20150315612 SEQ ID NO: 154 |
| AAVhu.13 | 211 | US20150159173 SEQ ID NO: 16, US20150315612 SEQ |
| | | ID NO: 71 |
| AAVhu.13 | 212 | US20150159173 SEQ ID NO: 32, US20150315612 SEQ |
| | | ID NO: 129 |
| AAVhu.136.1 | 213 | US20150315612 SEQ ID NO: 165 |
| AAVhu.140.1 | 214 | US20150315612 SEQ ID NO: 166 |
| AAVhu.140.2 | 215 | US20150315612 SEQ ID NO: 167 |
| AAVhu.145.6 | 216 | US20150315612 SEQ ID No: 178 |
| AAVhu.15 | 217 | US20150315612 SEQ ID NO: 147 |
| AAVhu.15 (AAV33.4) | 218 | US20150315612 SEQ ID NO: 50 |
| AAVhu.156.1 | 219 | US20150315612 SEQ ID No: 179 |
| AAVhu.16 | 220 | US20150315612 SEQ ID NO: 148 |
| AAVhu.16 (AAV33.8) | 221 | US20150315612 SEQ ID NO: 51 |
| AAVhu.17 | 222 | US20150315612 SEQ ID NO: 83 |
| AAVhu.17 (AAV33.12) | 223 | US20150315612 SEQ ID NO: 4 |
| AAVhu.172.1 | 224 | US20150315612 SEQ ID NO: 171 |
| AAVhu.172.2 | 225 | US20150315612 SEQ ID NO: 172 |
| AAVhu.173.4 | 226 | US20150315612 SEQ ID NO: 173 |
| AAVhu.173.8 | 227 | US20150315612 SEQ ID NO: 175 |
| AAVhu.18 | 228 | US20150315612 SEQ ID NO: 52 |
| AAVhu.18 | 229 | US20150315612 SEQ ID NO: 149 |
| AAVhu.19 | 230 | US20150315612 SEQ ID NO: 62 |
| AAVhu.19 | 231 | US20150315612 SEQ ID NO: 133 |
| AAVhu.2 | 232 | US20150315612 SEQ ID NO: 48 |
| AAVhu.2 | 233 | US20150315612 SEQ ID NO: 143 |
| AAVhu.20 | 234 | US20150315612 SEQ ID NO: 63 |
| AAVhu.20 | 235 | US20150315612 SEQ ID NO: 134 |
| AAVhu.21 | 236 | US20150315612 SEQ ID NO: 65 |
| AAVhu.21 | 237 | US20150315612 SEQ ID NO: 135 |
| AAVhu.22 | 238 | US20150315612 SEQ ID NO: 67 |
| AAVhu.22 | 239 | US20150315612 SEQ ID NO: 138 |
| AAVhu.23 | 240 | US20150315612 SEQ ID NO: 60 |
| AAVhu.23.2 | 241 | US20150315612 SEQ ID NO: 137 |
| AAVhu.24 | 242 | US20150315612 SEQ ID NO: 66 |
| AAVhu.24 | 243 | US20150315612 SEQ ID NO: 136 |
| AAVhu.25 | 244 | US20150315612 SEQ ID NO: 49 |
| AAVhu.25 | 245 | US20150315612 SEQ ID NO: 146 |
| AAVhu.26 | 246 | US20150159173 SEQ ID NO: 17, US20150315612 SEQ |
| | | ID NO: 61 |
| AAVhu.26 | 247 | US20150159173 SEQ ID NO: 33, US20150315612 SEQ |
| | | ID NO: 139 |
| AAVhu.27 | 248 | US20150315612 SEQ ID NO: 64 |
| AAVhu.27 | 249 | US20150315612 SEQ ID NO: 140 |
| AAVhu.28 | 250 | US20150315612 SEQ ID NO: 68 |
| AAVhu.28 | 251 | US20150315612 SEQ ID NO: 130 |
| AAVhu.29 | 252 | US20150315612 SEQ ID NO: 69 |
| AAVhu.29 | 253 | US20150159173 SEQ ID NO: 42, US20150315612 SEQ |
| | | ID NO: 132 |
| AAVhu.29 | 254 | US20150315612 SEQ ID NO: 225 |
| AAVhu.29R | 255 | US20150159173 |
| AAVhu.3 | 256 | US20150315612 SEQ ID NO: 44 |
| AAVhu.3 | 257 | US20150315612 SEQ ID NO: 145 |
| AAVhu.30 | 258 | US20150315612 SEQ ID NO: 70 |
| AAVhu.30 | 259 | US20150315612 SEQ ID NO: 131 |
| AAVhu.31 | 260 | US20150315612 SEQ ID NO: 1 |
| AAVhu.31 | 261 | US20150315612 SEQ ID NO: 121 |
| AAVhu.32 | 262 | US20150315612 SEQ ID NO: 2 |
| AAVhu.32 | 263 | US20150315612 SEQ ID NO: 122 |
| AAVhu.33 | 264 | US20150315612 SEQ ID NO: 75 |
| AAVhu.33 | 265 | US20150315612 SEQ ID NO: 124 |
| AAVhu.34 | 266 | US20150315612 SEQ ID NO: 72 |
| AAVhu.34 | 267 | US20150315612 SEQ ID NO: 125 |
| AAVhu.35 | 268 | US20150315612 SEQ ID NO: 73 |
| AAVhu.35 | 269 | US20150315612 SEQ ID NO: 164 |
| AAVhu.36 | 270 | US20150315612 SEQ ID NO: 74 |
| AAVhu.36 | 271 | US20150315612 SEQ ID NO: 126 |
| AAVhu.37 | 272 | US20150159173 SEQ ID NO: 34, US20150315612 SEQ |
| | | ID NO: 88 |
| AAVhu.37 (AAV106.1) | 273 | US20150315612 SEQ ID NO: 10, US20150159173 SEQ |
| | | ID NO: 18 |
| AAVhu.38 | 274 | US20150315612 SEQ ID NO: 161 |
| AAVhu.39 | 275 | US20150315612 SEQ ID NO: 102 |
| AAVhu.39 (AAVLG-9) | 276 | US20150315612 SEQ ID NO: 24 |
| AAVhu.4 | 277 | US20150315612 SEQ ID NO: 47 |
| AAVhu.4 | 278 | US20150315612 SEQ ID NO: 141 |
| AAVhu.40 | 279 | US20150315612 SEQ ID NO: 87 |
| AAVhu.40 (AAV114.3) | 280 | US20150315612 SEQ ID No: 11 |
| AAVhu.41 | 281 | US20150315612 SEQ ID NO: 91 |
| AAVhu.41 (AAV127.2) | 282 | US20150315612 SEQ ID NO: 6 |
| AAVhu.42 | 283 | US20150315612 SEQ ID NO: 85 |
| AAVhu.42 (AAV127.5) | 284 | US20150315612 SEQ ID NO: 8 |
| AAVhu.43 | 285 | US20150315612 SEQ ID NO: 160 |
| AAVhu.43 | 286 | US20150315612 SEQ ID NO: 236 |
| AAVhu.43 (AAV128.1) | 287 | US20150315612 SEQ ID NO: 80 |
| AAVhu.44 | 288 | US20150159173 SEQ ID NO: 45, US20150315612 SEQ |
| | | ID NO: 158 |
| AAVhu.44 (AAV128.3) | 289 | US20150315612 SEQ ID NO: 81 |
| AAVhu.44R1 | 290 | US20150159173 |
| AAVhu.44R2 | 291 | US20150159173 |
| AAVhu.44R3 | 292 | US20150159173 |
| AAVhu.45 | 293 | US20150315612 SEQ ID NO: 76 |
| AAVhu.45 | 294 | US20150315612 SEQ ID NO: 127 |
| AAVhu.46 | 295 | US20150315612 SEQ ID NO: 82 |
| AAVhu.46 | 296 | US20150315612 SEQ ID NO: 159 |
| AAVhu.46 | 297 | US20150315612 SEQ ID NO: 224 |
| AAVhu.47 | 298 | US20150315612 SEQ ID NO: 77 |
| AAVhu.47 | 299 | US20150315612 SEQ ID NO: 128 |
| AAVhu.48 | 300 | US20150159173 SEQ ID NO: 38 |
| AAVhu.48 | 301 | US20150315612 SEQ ID NO: 157 |
| AAVhu.48 (AAV130.4) | 302 | US20150315612 SEQ ID NO: 78 |
| AAVhu.48R1 | 303 | US20150159173 |
| AAVhu.48R2 | 304 | US20150159173 |
| AAVhu.48R3 | 305 | US20150159173 |
| AAVhu.49 | 306 | US20150315612 SEQ ID NO: 209 |
| AAVhu.49 | 307 | US20150315612 SEQ ID NO: 189 |
| AAVhu.5 | 308 | US20150315612 SEQ ID NO: 45 |
| AAVhu.5 | 309 | US20150315612 SEQ ID NO: 142 |
| AAVhu.51 | 310 | US20150315612 SEQ ID NO: 208 |
| AAVhu.51 | 311 | US20150315612 SEQ ID NO: 190 |
| AAVhu.52 | 312 | US20150315612 SEQ ID NO: 210 |
| AAVhu.52 | 313 | US20150315612 SEQ ID NO: 191 |
| AAVhu.53 | 314 | US20150159173 SEQ ID NO: 19 |
| AAVhu.53 | 315 | US20150159173 SEQ ID NO: 35 |
| AAVhu.53 (AAV145.1) | 316 | US20150315612 SEQ ID NO: 176 |
| AAVhu.54 | 317 | US20150315612 SEQ ID NO: 188 |
| AAVhu.54 (AAV145.5) | 318 | US20150315612 SEQ ID No: 177 |
| AAVhu.55 | 319 | US20150315612 SEQ ID NO: 187 |
| AAVhu.56 | 320 | US20150315612 SEQ ID NO: 205 |
| AAVhu.56 (AAV145.6) | 321 | US20150315612 SEQ ID NO: 168 |
| AAVhu.56 (AAV145.6) | 322 | US20150315612 SEQ ID NO: 192 |
| AAVhu.57 | 323 | US20150315612 SEQ ID NO: 206 |
| AAVhu.57 | 324 | US20150315612 SEQ ID NO: 169 |
| AAVhu.57 | 325 | US20150315612 SEQ ID NO: 193 |
| AAVhu.58 | 326 | US20150315612 SEQ ID NO: 207 |
| AAVhu.58 | 327 | US20150315612 SEQ ID NO: 194 |
| AAVhu.6 (AAV3.1) | 328 | US20150315612 SEQ ID NO: 5 |
| AAVhu.6 (AAV3.1) | 329 | US20150315612 SEQ ID NO: 84 |
| AAVhu.60 | 330 | US20150315612 SEQ ID NO: 184 |
| AAVhu.60 (AAV161.10) | 331 | US20150315612 SEQ ID NO: 170 |
| AAVhu.61 | 332 | US20150315612 SEQ ID NO: 185 |
| AAVhu.61 (AAV161.6) | 333 | US20150315612 SEQ ID NO: 174 |
| AAVhu.63 | 334 | US20150315612 SEQ ID NO: 204 |
| AAVhu.63 | 335 | US20150315612 SEQ ID NO: 195 |
| AAVhu.64 | 336 | US20150315612 SEQ ID NO: 212 |
| AAVhu.64 | 337 | US20150315612 SEQ ID NO: 196 |
| AAVhu.66 | 338 | US20150315612 SEQ ID NO: 197 |
| AAVhu.67 | 339 | US20150315612 SEQ ID NO: 215 |
| AAVhu.67 | 340 | US20150315612 SEQ ID NO: 198 |
| AAVhu.7 | 341 | US20150315612 SEQ ID NO: 226 |
| AAVhu.7 | 342 | US20150315612 SEQ ID NO: 150 |
| AAVhu.7 (AAV7.3) | 343 | US20150315612 SEQ ID NO: 55 |
| AAVhu.71 | 344 | US20150315612 SEQ ID NO: 79 |
| AAVhu.8 | 345 | US20150315612 SEQ ID NO: 53 |
| AAVhu.8 | 346 | US20150315612 SEQ ID NO: 12 |
| AAVhu.8 | 347 | US20150315612 SEQ ID NO: 151 |
| AAVhu.9 (AAV3.1) | 348 | US20150315612 SEQ ID NO: 58 |
| AAVhu.9 (AAV3.1) | 349 | US20150315612 SEQ ID NO: 155 |
| AAV-LK01 | 350 | US20150376607 SEQ ID NO: 2 |
| AAV-LK01 | 351 | US20150376607 SEQ ID NO: 29 |
| AAV-LK02 | 352 | US20150376607 SEQ ID NO: 3 |
| AAV-LK02 | 353 | US20150376607 SEQ ID NO: 30 |
| AAV-LK03 | 354 | US20150376607 SEQ ID NO: 4 |
| AAV-LK03 | 355 | WO2015121501 SEQ ID NO: 12, US20150376607 SEQ |
| | | ID NO: 31 |
| AAV-LK04 | 356 | US20150376607 SEQ ID NO: 5 |
| AAV-LK04 | 357 | US20150376607 SEQ ID NO: 32 |
| AAV-LK05 | 358 | US20150376607 SEQ ID NO: 6 |
| AAV-LK05 | 359 | US20150376607 SEQ ID NO: 33 |
| AAV-LK06 | 360 | US20150376607 SEQ ID NO: 7 |

[0104] Each of the patents, applications and/or publications listed in Table 1 are hereby incorporated by reference in their entirety.

[0105] In one embodiment, the AAV particle may be engineered to comprise at least one AAV capsid CD8+ T-cell epitope. Hui et al. (Molecular Therapy—Methods & Clinical Development (2015) 2, 15029 doi:10.1038/mtm.2015.29; the contents of which are herein incorporated by reference in their entirety) identified AAV capsid-specific CD8+ T-cell epitopes for AAV1 and AAV2 (see e.g., Table 2 in the publication). As a non-limiting example, the capsid-specific CD8+ T-cell epitope may be for an AAV2 serotype. As a non-limiting example, the capsid-specific CD8+ T-cell epitope may be for an AAV1 serotype.

[0106] In one embodiment, the AAV particle may be engineered to comprise at least one AAV capsid CD8+ T-cell epitope for AAV2 such as, but not limited to, SADNNNSEY (SEQ ID NO: 884), LIDQYLYYL (SEQ ID NO: 885), VPQYGYLTL (SEQ ID NO: 886), TTSTRTWAL (SEQ ID NO: 887), YHLNGRDSL (SEQ ID NO: 888), SQAVGRSSF (SEQ ID NO: 889), VPANPSTTF (SEQ ID NO: 890), FPQSGVLIF (SEQ ID NO: 891), YFDFNRFHCHFSPRD (SEQ ID NO: 892), VGNSSGNWHCDSTWM (SEQ ID NO: 893), QFSQAGASDIRDQSR (SEQ ID NO: 894), GASDIRQSRNWLP (SEQ ID NO: 895) and GNRQAATADVNTQGV (SEQ ID NO: 896).

[0107] In one embodiment, the AAV particle may be engineered to comprise at least one AAV capsid CD8+ T-cell epitope for AAV1 such as, but not limited to, LDRLMNPLI (SEQ ID NO: 897), TTSTRTWAL (SEQ ID NO: 887), and QPAKKRLNF (SEQ ID NO: 898).

[0108] In one embodiment, peptides for inclusion in an AAV particle may be identified using the methods described by Hui et al. (Molecular Therapy—Methods & Clinical Development (2015) 2, 15029 doi:10.1038/mtm.2015.29; the contents of which are herein incorporated by reference in their entirety). As a non-limiting example, the procedure includes isolating human splenocytes, restimulating the splenocytes in vitro using individual peptides spanning the amino acid sequence of the AAV capsid protein, IFN-gamma ELISpot with the individual peptides used for the in vitro restimulation, bioinformatics analysis to determine the HLA restriction of 15-mers identified by IFN-gamma ELISpot, identification of candidate reactive 9-mer epitopes for a given HLA allele, synthesis candidate 9-mers, second IFN-gamma ELISpot screening of splenocytes from subjects carrying the HLA alleles to which identified AAV epitopes are predicted to bind, determine the AAV capsid-reactive CD8+ T cell epitopes and determine the frequency of subjects reacting to a given AAV epitope.

[0109] In one embodiment, peptides for inclusion in an AAV particle may be identified by isolating human splenocytes, restimulating the splenocytes in vitro using individual peptides spanning the amino acid sequence of the AAV capsid protein, IFN-gamma ELISpot with the individual peptides used for the in vitro restimulation, bioinformatics analysis to determine the given allele restriction of 15-mers identified by IFN-gamma ELISpot, identification of candidate reactive 9-mer epitopes for a given allele, synthesis candidate 9-mers, second IFN-gamma ELISpot screening of splenocytes from subjects carrying the specific alleles to which identified AAV epitopes are predicted to bind, determine the AAV capsid-reactive CD8+ T cell epitopes and determine the frequency of subjects reacting to a given AAV epitope.

### AAV Vectors and Capsids

[0110] The present disclosure also provides nucleic acids encoding the mutated or modified virus capsids and capsid proteins. In some embodiments the capsids are engineered according to the methods of International Publication No. WO2015191508, the contents of which are incorporated herein by reference in their entirety and by methods known in the art.

[0111] Further provided are vectors comprising the nucleic acids, and cells (in vivo or in culture) comprising the nucleic acids and/or vectors. Suitable vectors include without limitation viral vectors (e.g., adenovirus, AAV, herpes virus, vaccinia, poxviruses, baculoviruses, and the like), plasmids, phage, YACs, BACs, and the like as are well known in the art. Such nucleic acids, vectors and cells can be used, for example, as reagents (e.g., helper packaging constructs or packaging cells) for the production of modified virus capsids or virus vectors as described herein.

[0112] The molecules which contain AAV sequences include any genetic element (vector) which may be delivered to a host cell, e.g., naked DNA, a plasmid, phage, transposon, cosmid, episome, a protein in a non-viral delivery vehicle (e.g., a lipid-based carrier), virus, etc., which transfers the sequences carried thereon. The selected vector may be delivered by any suitable method, including transfection, electroporation, liposome delivery, membrane fusion techniques, high velocity DNA-coated pellets, viral infection and protoplast fusion. The methods used to construct any embodiment of this disclosure are known to those with skill in nucleic acid manipulation and include genetic engineering, recombinant engineering, and synthetic techniques. (See, e.g., Sambrook et al., Molecular Cloning: A Laboratory Manual, Cold Spring Harbor Press, Cold Spring Harbor, N.Y.).

[0113] The transgene or payload can be carried on any suitable vector, e.g., a plasmid, which is delivered to a host cell. The plasmids useful in this disclosure may be engineered such that they are suitable for replication and, optionally, integration in prokaryotic cells, mammalian cells, or both. These plasmids contain sequences permitting replication of the transgene in eukaryotes and/or prokaryotes and selection markers for these systems. Selectable markers or reporter genes may include sequences encoding geneticin, hygromicin or purimycin resistance, among others. The plasmids may also contain certain selectable reporters or marker genes that can be used to signal the presence of the vector in bacterial cells, such as ampicillin resistance. Other components of the plasmid may include an origin of replication and an amplicon, such as the amplicon system employing the Epstein Barr virus nuclear antigen. This amplicon system, or other similar amplicon components permit high copy episomal replication in the cells. Preferably, the molecule carrying the transgene or payload is transfected into the cell, where it may exist transiently. Alternatively, the transgene may be stably integrated into the genome of the host cell, either chromosomally or as an episome. In certain embodiments, the transgene may be present in multiple copies, optionally in head-to-head, head-to-tail, or tail-to-tail concatamers. Suitable transfection techniques are known and may readily be utilized to deliver the transgene to the host cell.

### Promoters

[0114] A person skilled in the art may recognize that a target cell may require a specific promoter including but not limited to a promoter that is species specific, inducible, tissue-specific, or cell cycle-specific Parr et al., Nat. Med. 3:1145-9 (1997); the contents of which are herein incorporated by reference in their entirety.

[0115] In one embodiment, the promoter is deemed to be efficient for the AADC polynucleotide.

[0116] In one embodiment, the promoter is deemed to be efficient when it drives expression of the polypeptide(s) encoded in the payload region of the viral genome of the AAV particle.

[0117] In one embodiment, the promoter is deemed to be efficient for the cell being targeted.

[0118] In one embodiment, the promoter provides expression of a payload described herein for a period of time in targeted tissues. As a non-limiting example, expression driven by a promoter may be for nervous system tissues. Expression may be for a period of 1 hour, 2, hours, 3 hours, 4 hours, 5 hours, 6 hours, 7 hours, 8 hours, 9 hours, 10 hours, 11 hours, 12 hours, 13 hours, 14 hours, 15 hours, 16 hours, 17 hours, 18 hours, 19 hours, 20 hours, 21 hours, 22 hours, 23 hours, 1 day, 2 days, 3 days, 4 days, 5 days, 6 days, 1 week, 8 days, 9 days, 10 days, 11 days, 12 days, 13 days, 2 weeks, 15 days, 16 days, 17 days, 18 days, 19 days, 20 days, 3 weeks, 22 days, 23 days, 24 days, 25 days, 26 days, 27 days, 28 days, 29 days, 30 days, 31 days, 1 month, 2 months, 3 months, 4 months, 5 months, 6 months, 7 months, 8 months, 9 months, 10 months, 11 months, 1 year, 13 months, 14 months, 15 months, 16 months, 17 months, 18 months, 19 months, 20 months, 21 months, 22 months, 23 months, 2 years, 3 years, 4 years, 5 years, 6 years, 7 years, 8 years, 9 years, 10 years or more than 10 years. Expression may be for 1-5 hours, 1-12 hours, 1-2 days, 1-5 days, 1-2 weeks, 1-3 weeks, 1-4 weeks, 1-2 months, 1-4 months, 1-6 months, 2-6 months, 3-6 months, 3-9 months, 4-8 months, 6-12 months, 1-2 years, 1-5 years, 2-5 years, 3-6 years, 3-8 years, 4-8 years or 5-10 years. As a non-limiting example, the promoter is a promoter for sustained expression in nervous system tissue such as, but not limited to, neuronal tissue and glial tissue.

[0119] In one embodiment, the promoter is a promoter which provides expression of a payload described herein for at least 1 month, 2 months, 3 months, 4 months, 5 months, 6 months, 7 months, 8 months, 9 months, 10 months, 11 months, 1 year, 2 years, 3 years 4 years, 5 years, 6 years, 7 years, 8 years, 9 years, 10 years, 11 years, 12 years, 13 years, 14 years, 15 years, 16 years, 17 years, 18 years, 19 years, 20 years, 21 years, 22 years, 23 years, 24 years, 25 years, 26 years, 27 years, 28 years, 29 years, 30 years, 31 years, 32 years, 33 years, 34 years, 35 years, 36 years, 37 years, 38 years, 39 years, 40 years, 41 years, 42 years, 43 years, 44 years, 45 years, 46 years, 47 years, 48 years, 49 years, 50 years, 55 years, 60 years, 65 years, or more than 65 years.

[0120] In one embodiment, the FRDA promoter is used with the AADC polynucleotides described herein.

[0121] In one embodiment, there is a region located approximately ˜5 kb upstream of the first exon of the payload. As a non-limiting example, there is a 17 bp region located approximately 4.9 kb upstream of the first exon of the frataxin gene in order to allow for expression with the FRDA promoter (See e.g., Puspasari et al. Long Range Regulation of Human FXN Gene Expression, PLOS ONE, 2011; the contents of which are herein incorporated by reference in their entirety).

[0122] Promoters may be naturally occurring or non-naturally occurring. Non-limiting examples of promoters include viral promoters, plant promoters and mammalian promoters. In some embodiments, the promoters may be human promoters. In some embodiments, the promoter may be truncated.

[0123] Promoters which drive or promote expression in most tissues include, but are not limited to, human elongation factor 1α-subunit (EF1α), cytomegalovirus (CMV) immediate-early enhancer and/or promoter, chicken β-actin (CBA) and its derivative CAG, β glucuronidase (GUSB), or ubiquitin C (UBC). Tissue-specific expression elements can be used to restrict expression to certain cell types such as, but not limited to, muscle specific promoters, B cell promoters, monocyte promoters, leukocyte promoters, macrophage promoters, pancreatic acinar cell promoters, endothelial cell promoters, lung tissue promoters, astrocyte promoters, or nervous system promoters which can be used to restrict expression to neurons, astrocytes, or oligodendrocytes.

[0124] Non-limiting examples of muscle-specific promoters include mammalian muscle creatine kinase (MCK) promoter, mammalian desmin (DES) promoter, mammalian troponin I (TNNI2) promoter, and mammalian skeletal alpha-actin (ASKA) promoter (see, e.g. U.S. Patent Publication US 20110212529, the contents of which are herein incorporated by reference in their entirety)

[0125] Non-limiting examples of tissue-specific expression elements for neurons include neuron-specific enolase (NSE), platelet-derived growth factor (PDGF), platelet-derived growth factor B-chain (PDGF-β), synapsin (Syn), methyl-CpG binding protein 2 (MeCP2), Ca²⁺/calmodulin-dependent protein kinase II (CaMKII), metabotropic glutamate receptor 2 (mGluR2), neurofilament light (NFL) or heavy (NFH), β-globin minigene nβ2, preproenkephalin (PPE), enkephalin (Enk) and excitatory amino acid transporter 2 (EAAT2) promoters. Non-limiting examples of tissue-specific expression elements for astrocytes include glial fibrillary acidic protein (GFAP) and EAAT2 promoters. A non-limiting example of a tissue-specific expression element for oligodendrocytes includes the myelin basic protein (MBP) promoter.

[0126] In one embodiment, the promoter may be less than 1 kb. The promoter may have a length of 200, 210, 220, 230, 240, 250, 260, 270, 280, 290, 300, 310, 320, 330, 340, 350, 360, 370, 380, 390, 400, 410, 420, 430, 440, 450, 460, 470, 480, 490, 500, 510, 520, 530, 540, 550, 560, 570, 580, 590, 600, 610, 620, 630, 640, 650, 660, 670, 680, 690, 700, 710, 720, 730, 740, 750, 760, 770, 780, 790, 800 or more than 800 nucleotides. The promoter may have a length between 200-300, 200-400, 200-500, 200-600, 200-700, 200-800, 300-400, 300-500, 300-600, 300-700, 300-800, 400-500, 400-600, 400-700, 400-800, 500-600, 500-700, 500-800, 600-700, 600-800 or 700-800.

[0127] In one embodiment, the promoter may be a combination of two or more components of the same or different starting or parental promoters such as, but not limited to, CMV and CBA. Each component may have a length of 200, 210, 220, 230, 240, 250, 260, 270, 280, 290, 300, 310, 320, 330, 340, 350, 360, 370, 380, 381, 382, 383, 384, 385, 386, 387, 388, 389, 390, 400, 410, 420, 430, 440, 450, 460, 470, 480, 490, 500, 510, 520, 530, 540, 550, 560, 570, 580, 590, 600, 610, 620, 630, 640, 650, 660, 670, 680, 690, 700, 710, 720, 730, 740, 750, 760, 770, 780, 790, 800 or more than 800. Each component may have a length between 200-300, 200-400, 200-500, 200-600, 200-700, 200-800, 300-400, 300-500, 300-600, 300-700, 300-800, 400-500, 400-600, 400-700, 400-800, 500-600, 500-700, 500-800, 600-700, 600-800 or 700-800. In one embodiment, the promoter is a combination of a 382 nucleotide CMV-enhancer sequence and a 260 nucleotide CBA-promoter sequence.

[0128] In one embodiment, the viral genome comprises a ubiquitous promoter. Non-limiting examples of ubiquitous promoters include CMV, CBA (including derivatives CAG, CBh, etc.), EF-1α, PGK, UBC, GUSB (hGBp), and UCOE (promoter of HNRPA2B1-CBX3).

[0129] Yu et al. (Molecular Pain 2011, 7:63; the contents of which are herein incorporated by reference in their entirety) evaluated the expression of eGFP under the CAG, EFIa, PGK and UBC promoters in rat DRG cells and primary DRG cells using lentiviral vectors and found that UBC showed weaker expression than the other 3 promoters and only 10-12% glial expression was seen for all promoters. Soderblom et al. (E. Neuro 2015; the contents of which are herein incorporated by reference in their entirety) evaluated the expression of eGFP in AAV8 with CMV and UBC promoters and AAV2 with the CMV promoter after injection in the motor cortex. Intranasal administration of a plasmid containing a UBC or EFIa promoter showed a sustained airway expression greater than the expression with the CMV promoter (See e.g., Gill et al., Gene Therapy 2001, Vol. 8, 1539-1546; the contents of which are herein incorporated by reference in their entirety). Husain et al. (Gene Therapy 2009; the contents of which are herein incorporated by reference in their entirety) evaluated a HβH construct with a hGUSB promoter, a HSV-1LAT promoter and a NSE promoter and found that the HβH construct showed weaker expression than NSE in mouse brain. Passini and Wolfe (J. Virol. 2001, 12382-12392, the contents of which are herein incorporated by reference in their entirety) evaluated the long term effects of the HβH vector following an intraventricular injection in neonatal mice and found that there was sustained expression for at least 1 year. Low expression in all brain regions was found by Xu et al. (Gene Therapy 2001, 8, 1323-1332; the contents of which are herein incorporated by reference in their entirety) when NFL and NFH promoters were used as compared to the CMV-lacZ, CMV-luc, EF, GFAP, hENK, nAChR, PPE, PPE+wpre, NSE (0.3 kb), NSE (1.8 kb) and NSE (1.8 kb+wpre). Xu et al. found that the promoter activity in descending order was NSE (1.8 kb), EF, NSE (0.3 kb), GFAP, CMV, hENK, PPE, NFL and NFH. NFL is a 650 nucleotide promoter and NFH is a 920 nucleotide promoter which are both absent in the liver but NFH is abundant in the sensory proprioceptive neurons, brain and spinal cord and NFH is present in the heart. Scn8a is a 470 nucleotide promoter which expresses throughout the DRG, spinal cord and brain with particularly high expression seen in the hippocampal neurons and cerebellar Purkinje cells, cortex, thalamus and hypothalamus (See e.g., Drews et al. Identification of evolutionary conserved, functional noncoding elements in the promoter region of the sodium channel gene SCN8A, Mamm Genome (2007) 18:723-731; and Raymond et al. Expression of Alternatively Spliced Sodium Channel α-subunit genes, Journal of Biological Chemistry (2004) 279(44) 46234-46241; the contents of each of which are herein incorporated by reference in their entireties).

[0130] Any of promoters taught by the aforementioned Yu, Soderblom, Gill, Husain, Passini, Xu, Drews or Raymond may be used in the present disclosures.

[0131] In one embodiment, the promoter is not cell specific.

[0132] In one embodiment, the promoter is an ubiquitin c (UBC) promoter. The UBC promoter may have a size of 300-350 nucleotides. As a non-limiting example, the UBC promoter is 332 nucleotides.

[0133] In one embodiment, the promoter is a β-glucuronidase (GUSB) promoter. The GUSB promoter may have a size of 350-400 nucleotides. As a non-limiting example, the GUSB promoter is 378 nucleotides.

[0134] In one embodiment, the promoter is a neurofilament light (NFL) promoter. The NFL promoter may have a size of 600-700 nucleotides. As a non-limiting example, the NFL promoter is 650 nucleotides.

[0135] In one embodiment, the promoter is a neurofilament heavy (NFH) promoter. The NFH promoter may have a size of 900-950 nucleotides. As a non-limiting example, the NFH promoter is 920 nucleotides.

[0136] In one embodiment, the promoter is a scn8a promoter. The scn8a promoter may have a size of 450-500 nucleotides. As a non-limiting example, the scn8a promoter is 470 nucleotides.

[0137] In one embodiment, the promoter is a phosphoglycerate kinase 1 (PGK) promoter.

[0138] In one embodiment, the promoter is a chicken β-actin (CBA) promoter.

[0139] In one embodiment, the promoter is a cytomegalovirus (CMV) promoter.

[0140] In one embodiment, the promoter is a neuronal cell targeting promoter. A non-limiting example of a neuronal targeting promoter is a synapsin-1 promoter.

[0141] In one embodiment, the promoter is a liver or a skeletal muscle promoter. Non-limiting examples of liver promoters include human α-1-antitrypsin (hAAT) and thyroxine binding globulin (TBG). Non-limiting examples of skeletal muscle promoters include Desmin, MCK or synthetic C5-12.

[0142] In one embodiment, the promoter is a RNA pol III promoter. As a non-limiting example, the RNA pol III promoter is U6. As a non-limiting example, the RNA pol III promoter is H1.

[0143] In one embodiment, the viral genome comprises two promoters. As a non-limiting example, the promoters are an EF1α promoter and a CMV promoter.

[0144] In one embodiment, the viral genome comprises an enhancer element, a promoter and/or a 5′UTR intron. The enhancer element, also referred to herein as an “enhancer,” may be, but is not limited to, a CMV enhancer, the promoter may be, but is not limited to, a CMV, CBA, UBC, GUSB, NSE, Synapsin, MeCP2, and GFAP promoter and the 5′UTR/intron may be, but is not limited to, SV40, and CBA-MVM. As a non-limiting example, the enhancer, promoter and/or intron used in combination may be: (1) CMV enhancer, CMV promoter, SV40 5′UTR intron; (2) CMV enhancer, CBA promoter, SV 40 5′UTR intron; (3) CMV enhancer, CBA promoter, CBA-MVM 5′UTR intron; (4) UBC promoter; (5) GUSB promoter; (6) NSE promoter; (7) Synapsin promoter; (8) MeCP2 promoter and (9) GFAP promoter.

[0145] In one embodiment, the viral genome comprises an engineered promoter.

[0146] In another embodiment the viral genome comprises a promoter from a naturally expressed protein.

### Introns

[0147] In one embodiment, at least one element may be used with the AADC polynucleotides described herein to enhance the transgene target specificity and expression (See e.g., Powell et al. Viral Expression Cassette Elements to Enhance Transgene Target Specificity and Expression in Gene Therapy, 2015; the contents of which are herein incorporated by reference in their entirety) such as an intron. Non-limiting examples of introns include, MVM (67-97 bps), F.IX truncated intron 1 (300 bps), β-globin SD/immunoglobulin heavy chain splice acceptor (250 bps), adenovirus splice donor/immunoglobin splice acceptor (500 bps), SV40 late splice donor/splice acceptor (19S/16S) (180 bps) and hybrid adenovirus splice donor/IgG splice acceptor (230 bps).

[0148] In one embodiment, the intron may be 100-500 nucleotides in length. The intron may have a length of 80, 90, 100, 110, 120, 130, 140, 150, 160, 170, 171, 172, 173, 174, 175, 176, 177, 178, 179, 180, 190, 200, 210, 220, 230, 240, 250, 260, 270, 280, 290, 300, 310, 320, 330, 340, 350, 360, 370, 380, 390, 400, 410, 420, 430, 440, 450, 460, 470, 480, 490 or 500. The intron may have a length between 80-100, 80-120, 80-140, 80-160, 80-180, 80-200, 80-250, 80-300, 80-350, 80-400, 80-450, 80-500, 200-300, 200-400, 200-500, 300-400, 300-500, or 400-500.

### Functional Payloads

[0149] A payload may comprise a gene therapy product. A gene therapy product may comprise a polypeptide, RNA molecule, or other gene product that, when expressed in a target cell, provides a desired therapeutic effect. In some embodiments, a gene therapy product may comprise a substitute for a non-functional gene that is absent or mutated.

[0150] An AAV payload construct encoding a payload may comprise a selectable marker. A selectable marker may comprise a gene sequence or a protein encoded by that gene sequence expressed in a host cell that allows for the identification, selection, and/or purification of the host cell from a population of cells that may or may not express the selectable marker. In one embodiment the selectable marker provides resistance to survive a selection process that would otherwise kill the host cell, such as treatment with an antibiotic. In some embodiments an antibiotic selectable marker may comprise one or more antibiotic resistance factors, including but not limited to neomycin resistance (e.g., neo), hygromycin resistance, kanamycin resistance, and/or puromycin resistance.

[0151] In some embodiments a selectable marker may comprise a cell-surface marker, such as any protein expressed on the surface of the cell including, but not limited to receptors, CD markers, lectins, integrins, or truncated versions thereof. In some embodiments, cells that comprise a cell-surface marker may be selected using an antibody targeted to said cell-surface marker. In some embodiments an antibody targeted to the cell-surface marker may be directly conjugated with a selection agent including, but not limited to a fluorophore, sepharose, or magnetic bead. In some embodiments an antibody targeted to the cell-surface marker may be detected using a secondary labeled antibody or substrate which binds to the antibody targeted to the cell-surface marker. In some embodiments, a selectable marker may comprise negative selection by using an enzyme, including but not limited to Herpes simplex virus thymidine kinase (HSVTK) that converts a pro-toxin (gancyclovir) into a toxin or bacterial Cytosine Deaminase (CD) which converts the pro-toxin 5′-fluorocytosine (5′-FC) into the toxin 5′-fluorouracil (5′-FU). In some embodiments, any nucleic acid sequence encoding a polypeptide can be used as a selectable marker comprising recognition by a specific antibody.

[0152] In some embodiments, a payload construct encoding a payload may comprise a selectable marker including, but not limited to, β-lactamase, luciferase, β-galactosidase, or any other reporter gene as that term is understood in the art, including cell-surface markers, such as CD4 or the truncated nerve growth factor (NGFR) (for GFP, see WO 96/23810; Heim et al., Current Biology 2:178-182 (1996); Heim et al., Proc. Natl. Acad. Sci. USA (1995); or Heim et al., Science 373:663-664 (1995); for β-lactamase, see WO 96/30540). In some embodiments, a nucleic acid encoding a selectable marker may comprise a fluorescent protein. A fluorescent protein as herein described may comprise any fluorescent marker including but not limited to green, yellow, and/or red fluorescent protein (GFP, YFP, and/or RFP).

[0153] In accordance with the disclosure, a payload comprising a nucleic acid for expression in a target cell will be incorporated into the viral particle produced in the viral replication cell where said payload is located between two ITR sequences, or is located on either side of an asymmetrical ITR engineered with two D regions.

[0154] An AAV payload construct encoding one or more payloads for expression in a target cell may comprise one or more payload or non-payload nucleotide sequences operably linked to at least one target cell-compatible promoter. A person skilled in the art may recognize that a target cell may require a specific promoter including but not limited to a promoter that is species specific, inducible, tissue-specific, or cell cycle-specific Parr et al., Nat. Med. 3:1145-9 (1997).

### Viral Production

[0155] The present disclosure provides a method for the generation of parvoviral particles, e.g. AAV particles, by viral genome replication in a viral replication cell comprising contacting the viral replication cell with an AAV polynucleotide or AAV genome.

[0156] In one embodiment, the AAV particle of the present disclosure may be produced in insect cells (e.g., Sf9 cells).

[0157] In one embodiment, the AAV particle of the present disclosure may be produced using triple transfection.

[0158] In one embodiment, the AAV particle of the present disclosure may be produced in mammalian cells.

[0159] In one embodiment, the AAV particle of the present disclosure may be produced by triple transfection in mammalian cells.

[0160] In one embodiment, the AAV particle of the present disclosure may be produced by triple transfection in HEK293 cells.

[0161] In some embodiments, the present disclosure provides a method for producing an AAV particle having enhanced (increased, improved) transduction efficiency comprising the steps of: 1) co-transfecting competent bacterial cells with a bacmid vector and either a viral construct vector and/or AAV payload construct vector, 2) isolating the resultant viral construct expression vector and AAV payload construct expression vector and separately transfecting viral replication cells, 3) isolating and purifying resultant payload and viral construct particles comprising viral construct expression vector or AAV payload construct expression vector, 4) co-infecting a viral replication cell with both the AAV payload and viral construct particles comprising viral construct expression vector or AAV payload construct expression vector, and 5) harvesting and purifying the AAV particle comprising a viral genome.

[0162] In some embodiments, the present disclosure provides a method for producing an AAV particle comprising the steps of 1) simultaneously co-transfecting mammalian cells, such as, but not limited to HEK293 cells, with a payload region, a construct expressing rep and cap genes and a helper construct, 2) harvesting and purifying the AAV particle comprising a viral genome.

### Cells

[0163] The present disclosure provides a cell comprising an AAV polynucleotide and/or AAV genome.

[0164] Viral production disclosed herein describes processes and methods for producing AAV particles that contact a target cell to deliver a payload construct, e.g. a recombinant viral construct, which comprises a nucleotide encoding a payload molecule.

[0165] In one embodiment, the AAV particles may be produced in a viral replication cell that comprises an insect cell.

[0166] Growing conditions for insect cells in culture, and production of heterologous products in insect cells in culture are well-known in the art, see U.S. Pat. No. 6,204,059, the contents of which are herein incorporated by reference in their entirety.

[0167] Any insect cell which allows for replication of parvovirus and which can be maintained in culture can be used in accordance with the present disclosure. Cell lines may be used from Spodoptera frugiperda, including, but not limited to the Sf9 or Sf21 cell lines, Drosophila cell lines, or mosquito cell lines, such as Aedes albopictus derived cell lines. Use of insect cells for expression of heterologous proteins is well documented, as are methods of introducing nucleic acids, such as vectors, e.g., insect-cell compatible vectors, into such cells and methods of maintaining such cells in culture. See, for example, Methods in Molecular Biology, ed. Richard, Humana Press, N J (1995); O'Reilly et al., Baculovirus Expression Vectors, A Laboratory Manual, Oxford Univ. Press (1994); Samulski et al., J. Vir. 63:3822-8 (1989); Kajigaya et al., Proc. Nat'l. Acad. Sci. USA 88: 4646-50 (1991); Ruffing et al., J. Vir. 66:6922-30 (1992); Kimbauer et al., Vir. 219:37-44 (1996); Zhao et al., Vir. 272:382-93 (2000); and Samulski et al., U.S. Pat. No. 6,204,059, the contents of each of which is herein incorporated by reference in their entirety.

[0168] The viral replication cell may be selected from any biological organism, including prokaryotic (e.g., bacterial) cells, and eukaryotic cells, including, insect cells, yeast cells and mammalian cells. Viral replication cells may comprise mammalian cells such as A549, WEH1, 3T3, 10T1/2, BHK, MDCK, COS 1, COS 7, BSC 1, BSC 40, BMT 10, VERO, W138, HeLa, 293, Saos, C2C12, L cells, HT1080, HepG2 and primary fibroblast, hepatocyte and myoblast cells derived from mammals. Viral replication cells comprise cells derived from mammalian species including, but not limited to, human, monkey, mouse, rat, rabbit, and hamster or cell type, including but not limited to fibroblast, hepatocyte, tumor cell, cell line transformed cell, etc.

### Small Scale Production of AAV Particles

[0169] Viral production disclosed herein describes processes and methods for producing AAV particles that contact a target cell to deliver a payload, e.g. a recombinant viral construct, which comprises a nucleotide encoding a payload.

[0170] In one embodiment, the AAV particles may be produced in a viral replication cell that comprises a mammalian cell.

[0171] Viral replication cells commonly used for production of recombinant AAV particles include, but are not limited to 293 cells, COS cells, HeLa cells, KB cells, and other mammalian cell lines as described in U.S. Pat. Nos. 6,156,303, 5,387,484, 5,741,683, 5,691,176, and 5,688,676; U.S. patent application 2002/0081721, and International Patent Applications WO 00/47757, WO 00/24916, and WO 96/17947, the contents of each of which are herein incorporated by reference in their entireties.

[0172] In one embodiment, AAV particles are produced in mammalian-cells wherein all three VP proteins are expressed at a stoichiometry approaching 1:1:10 (VP1:VP2:VP3). The regulatory mechanisms that allow this controlled level of expression include the production of two mRNAs, one for VP1, and the other for VP2 and VP3, produced by differential splicing.

[0173] In another embodiment, AAV particles are produced in mammalian cells using a triple transfection method wherein a payload construct, parvoviral Rep, and parvoviral Cap are comprised within three different constructs. The triple transfection method of the three components of AAV particle production may be utilized to produce small lots of virus for assays including transduction efficiency, target tissue (tropism) evaluation, and stability.

### Baculovirus

[0174] Particle production disclosed herein describes processes and methods for producing AAV particles that contact a target cell to deliver a payload construct which comprises a nucleotide encoding a payload.

[0175] Briefly, the viral construct vector and the AAV payload construct vector are each incorporated by a transposon donor/acceptor system into a bacmid, also known as a baculovirus plasmid, by standard molecular biology techniques known and performed by a person skilled in the art. Transfection of separate viral replication cell populations produces two baculoviruses, one that comprises the viral construct expression vector, and another that comprises the AAV payload construct expression vector. The two baculoviruses may be used to infect a single viral replication cell population for production of AAV particles.

[0176] Baculovirus expression vectors for producing viral particles in insect cells, including but not limited to Spodoptera frugiperda (Sf9) cells, provide high titers of viral particle product. Recombinant baculovirus encoding the viral construct expression vector and AAV payload construct expression vector initiates a productive infection of viral replicating cells. Infectious baculovirus particles released from the primary infection secondarily infect additional cells in the culture, exponentially infecting the entire cell culture population in a number of infection cycles that is a function of the initial multiplicity of infection, see Urabe, M. et al., J Virol. 2006 February; 80 (4):1874-85, the contents of which are herein incorporated by reference in their entirety.

[0177] Production of AAV particles with baculovirus in an insect cell system may address known baculovirus genetic and physical instability. In one embodiment, the production system addresses baculovirus instability over multiple passages by utilizing a titerless infected-cells preservation and scale-up system. Small scale seed cultures of viral producing cells are transfected with viral expression constructs encoding the structural, non-structural, components of the viral particle. Baculovirus-infected viral producing cells are harvested into aliquots that may be cryopreserved in liquid nitrogen; the aliquots retain viability and infectivity for infection of large scale viral producing cell culture Wasilko D J et al., Protein Expr Purif. 2009 June; 65(2):122-32, the contents of which are herein incorporated by reference in their entirety.

[0178] A genetically stable baculovirus may be used to produce source of the one or more of the components for producing AAV particles in invertebrate cells. In one embodiment, defective baculovirus expression vectors may be maintained episomally in insect cells. In such an embodiment the bacmid vector is engineered with replication control elements, including but not limited to promoters, enhancers, and/or cell-cycle regulated replication elements.

[0179] In one embodiment, baculoviruses may be engineered with a (non-) selectable marker for recombination into the chitinase/cathepsin locus. The chia/v-cath locus is non-essential for propagating baculovirus in tissue culture, and the V-cath (EC 3.4.22.50) is a cysteine endoprotease that is most active on Arg-Arg dipeptide containing substrates. The Arg-Arg dipeptide is present in densovirus and parvovirus capsid structural proteins but infrequently occurs in dependovirus VP1.

[0180] In one embodiment, stable viral replication cells permissive for baculovirus infection are engineered with at least one stable integrated copy of any of the elements necessary for AAV replication and viral particle production including, but not limited to, the entire AAV genome, Rep and Cap genes, Rep genes, Cap genes, each Rep protein as a separate transcription cassette, each VP protein as a separate transcription cassette, the AAP (assembly activation protein), or at least one of the baculovirus helper genes with native or non-native promoters.

### Large-Scale Production

[0181] In some embodiments, AAV particle production may be modified to increase the scale of production. Large scale viral production methods according to the present disclosure may include any of those taught in U.S. Pat. Nos. 5,756,283, 6,258,595, 6,261,551, 6,270,996, 6,281,010, 6,365,394, 6,475,769, 6,482,634, 6,485,966, 6,943,019, 6,953,690, 7,022,519, 7,238,526, 7,291,498 and 7,491,508 or International Publication Nos. WO1996039530, WO1998010088, WO1999014354, WO1999015685, WO1999047691, WO2000055342, WO2000075353 and WO2001023597, the contents of each of which are herein incorporated by reference in their entirety. Methods of increasing viral particle production scale typically comprise increasing the number of viral replication cells. In some embodiments, viral replication cells comprise adherent cells. To increase the scale of viral particle production by adherent viral replication cells, larger cell culture surfaces are required. In some cases, large-scale production methods comprise the use of roller bottles to increase cell culture surfaces. Other cell culture substrates with increased surface areas are known in the art. Examples of additional adherent cell culture products with increased surface areas include, but are not limited to CELLSTACK®, CELLCUBE® (Corning Corp., Corning, N.Y.) and NUNC™ CELL FACTORY′ (Thermo Scientific, Waltham, Mass.) In some cases, large-scale adherent cell surfaces may comprise from about 1,000 cm² to about 100,000 cm². In some cases, large-scale adherent cell cultures may comprise from about 10⁷ to about 10⁹ cells, from about 10⁸ to about 10¹⁰ cells, from about 10⁹ to about 10¹² cells or at least 10¹² cells. In some cases, large-scale adherent cultures may produce from about 10⁹ to about 10¹², from about 10¹⁰ to about 10¹³, from about 10¹¹ to about 10¹⁴, from about 10¹² to about 10¹⁵ or at least 10¹⁵ viral particles.

[0182] In some embodiments, large-scale viral production methods of the present disclosure may comprise the use of suspension cell cultures. Suspension cell culture allows for significantly increased numbers of cells. Typically, the number of adherent cells that can be grown on about 10-50 cm² of surface area can be grown in about 1 cm³ volume in suspension.

[0183] Transfection of replication cells in large-scale culture formats may be carried out according to any methods known in the art. For large-scale adherent cell cultures, transfection methods may include, but are not limited to the use of inorganic compounds (e.g. calcium phosphate), organic compounds (e.g. polyethylenimine (PEI)) or the use of non-chemical methods (e.g. electroporation.) With cells grown in suspension, transfection methods may include, but are not limited to the use of calcium phosphate and the use of PEI. In some cases, transfection of large scale suspension cultures may be carried out according to the section entitled “Transfection Procedure” described in Feng, L. et al., 2008. Biotechnol Appl. Biochem. 50:121-32, the contents of which are herein incorporated by reference in their entirety. According to such embodiments, PEI-DNA complexes may be formed for introduction of plasmids to be transfected. In some cases, cells being transfected with PEI-DNA complexes may be ‘shocked’ prior to transfection. This comprises lowering cell culture temperatures to 4° C. for a period of about 1 hour. In some cases, cell cultures may be shocked for a period of from about 10 minutes to about 5 hours. In some cases, cell cultures may be shocked at a temperature of from about 0° C. to about 20° C.

[0184] In some cases, transfections may include one or more vectors for expression of an RNA effector molecule to reduce expression of nucleic acids from one or more AAV payload construct. Such methods may enhance the production of viral particles by reducing cellular resources wasted on expressing payload constructs. In some cases, such methods may be carried according to those taught in US Publication No. US2014/0099666, the contents of which are herein incorporated by reference in their entirety.

### Bioreactors

[0185] In some embodiments, cell culture bioreactors may be used for large scale viral production. In some cases, bioreactors comprise stirred tank reactors. Such reactors generally comprise a vessel, typically cylindrical in shape, with a stirrer (e.g. impeller.) In some embodiments, such bioreactor vessels may be placed within a water jacket to control vessel temperature and/or to minimize effects from ambient temperature changes. Bioreactor vessel volume may range in size from about 500 ml to about 2 L, from about 1 L to about 5 L, from about 2.5 L to about 20 L, from about 10 L to about 50 L, from about 25 L to about 100 L, from about 75 L to about 500 L, from about 250 L to about 2,000 L, from about 1,000 L to about 10,000 L, from about 5,000 L to about 50,000 L or at least 50,000 L. Vessel bottoms may be rounded or flat. In some cases, animal cell cultures may be maintained in bioreactors with rounded vessel bottoms.

[0186] In some cases, bioreactor vessels may be warmed through the use of a thermocirculator. Thermocirculators pump heated water around water jackets. In some cases, heated water may be pumped through pipes (e.g. coiled pipes) that are present within bioreactor vessels. In some cases, warm air may be circulated around bioreactors, including, but not limited to air space directly above culture medium. Additionally, pH and CO₂ levels may be maintained to optimize cell viability.

[0187] In some cases, bioreactors may comprise hollow-fiber reactors. Hollow-fiber bioreactors may support the culture of both anchorage dependent and anchorage independent cells. Further bioreactors may include, but are not limited to packed-bed or fixed-bed bioreactors. Such bioreactors may comprise vessels with glass beads for adherent cell attachment. Further packed-bed reactors may comprise ceramic beads.

[0188] In some cases, viral particles are produced through the use of a disposable bioreactor. In some embodiments, such bioreactors may include WAVE′ disposable bioreactors.

[0189] In some embodiments, AAV particle production in animal cell bioreactor cultures may be carried out according to the methods taught in U.S. Pat. Nos. 5,064,764, 6,194,191, 6,566,118, 8,137,948 or US Patent Application No. US2011/0229971, the contents of each of which are herein incorporated by reference in their entirety.

### Cell Lysis

[0190] Cells of the disclosure, including, but not limited to viral production cells, may be subjected to cell lysis according to any methods known in the art. Cell lysis may be carried out to obtain one or more agents (e.g. viral particles) present within any cells of the disclosure. In some embodiments, cell lysis may be carried out according to any of the methods listed in U.S. Pat. Nos. 7,326,555, 7,579,181, 7,048,920, 6,410,300, 6,436,394, 7,732,129, 7,510,875, 7,445,930, 6,726,907, 6,194,191, 7,125,706, 6,995,006, 6,676,935, 7,968,333, 5,756,283, 6,258,595, 6,261,551, 6,270,996, 6,281,010, 6,365,394, 6,475,769, 6,482,634, 6,485,966, 6,943,019, 6,953,690, 7,022,519, 7,238,526, 7,291,498 and 7,491,508 or International Publication Nos. WO1996039530, WO1998010088, WO1999014354, WO1999015685, WO1999047691, WO2000055342, WO2000075353 and WO2001023597, the contents of each of which are herein incorporated by reference in their entirety. Cell lysis methods may be chemical or mechanical. Chemical cell lysis typically comprises contacting one or more cells with one or more lysis agent. Mechanical lysis typically comprises subjecting one or more cells to one or more lysis condition and/or one or more lysis force.

[0191] In some embodiments, chemical lysis may be used to lyse cells. As used herein, the term “lysis agent” refers to any agent that may aid in the disruption of a cell. In some cases, lysis agents are introduced in solutions, termed lysis solutions or lysis buffers. As used herein, the term “lysis solution” refers to a solution (typically aqueous) comprising one or more lysis agent. In addition to lysis agents, lysis solutions may include one or more buffering agents, solubilizing agents, surfactants, preservatives, cryoprotectants, enzymes, enzyme inhibitors and/or chelators. Lysis buffers are lysis solutions comprising one or more buffering agent. Additional components of lysis solutions may include one or more solubilizing agent. As used herein, the term “solubilizing agent” refers to a compound that enhances the solubility of one or more components of a solution and/or the solubility of one or more entities to which solutions are applied. In some cases, solubilizing agents enhance protein solubility. In some cases, solubilizing agents are selected based on their ability to enhance protein solubility while maintaining protein conformation and/or activity.

[0192] Exemplary lysis agents may include any of those described in U.S. Pat. Nos. 8,685,734, 7,901,921, 7,732,129, 7,223,585, 7,125,706, 8,236,495, 8,110,351, 7,419,956, 7,300,797, 6,699,706 and 6,143,567, the contents of each of which are herein incorporated by reference in their entirety. In some cases, lysis agents may be selected from lysis salts, amphoteric agents, cationic agents, ionic detergents and non-ionic detergents. Lysis salts may include, but are not limited to sodium chloride (NaCl) and potassium chloride (KCl) Further lysis salts may include any of those described in U.S. Pat. Nos. 8,614,101, 7,326,555, 7,579,181, 7,048,920, 6,410,300, 6,436,394, 7,732,129, 7,510,875, 7,445,930, 6,726,907, 6,194,191, 7,125,706, 6,995,006, 6,676,935 and 7,968,333, the contents of each of which are herein incorporated by reference in their entirety. Concentrations of salts may be increased or decreased to obtain an effective concentration for rupture of cell membranes. Amphoteric agents, as referred to herein, are compounds capable of reacting as an acid or a base. Amphoteric agents may include, but are not limited to lysophosphatidylcholine, 3-((3-Cholamidopropyl) dimethylammonium)-1-propanesulfonate (CHAPS), ZWITTERGENT® and the like. Cationic agents may include, but are not limited to cetyltrimethylammonium bromide (C (16) TAB) and Benzalkonium chloride. Lysis agents comprising detergents may include ionic detergents or non-ionic detergents. Detergents may function to break apart or dissolve cell structures including, but not limited to cell membranes, cell walls, lipids, carbohydrates, lipoproteins and glycoproteins. Exemplary ionic detergents include any of those taught in U.S. Pat. Nos. 7,625,570 and 6,593,123 or US Publication No. US2014/0087361, the contents of each of which are herein incorporated by reference in their entirety. Some ionic detergents may include, but are not limited to sodium dodecyl sulfate (SDS), cholate and deoxycholate. In some cases, ionic detergents may be included in lysis solutions as a solubilizing agent. Non-ionic detergents may include, but are not limited to octylglucoside, digitonin, lubrol, C12E8, TWEEN®-20, TWEEN®-80, Triton X-100 and Noniodet P-40. Non-ionic detergents are typically weaker lysis agents, but may be included as solubilizing agents for solubilizing cellular and/or viral proteins. Further lysis agents may include enzymes and urea. In some cases, one or more lysis agents may be combined in a lysis solution in order to enhance one or more of cell lysis and protein solubility. In some cases, enzyme inhibitors may be included in lysis solutions in order to prevent proteolysis that may be triggered by cell membrane disruption.

[0193] In some embodiments, mechanical cell lysis is carried out. Mechanical cell lysis methods may include the use of one or more lysis condition and/or one or more lysis force. As used herein, the term “lysis condition” refers to a state or circumstance that promotes cellular disruption. Lysis conditions may comprise certain temperatures, pressures, osmotic purity, salinity and the like. In some cases, lysis conditions comprise increased or decreased temperatures. According to some embodiments, lysis conditions comprise changes in temperature to promote cellular disruption. Cell lysis carried out according to such embodiments may include freeze-thaw lysis. As used herein, the term “freeze-thaw lysis” refers to cellular lysis in which a cell solution is subjected to one or more freeze-thaw cycle. According to freeze-thaw lysis methods, cells in solution are frozen to induce a mechanical disruption of cellular membranes caused by the formation and expansion of ice crystals. Cell solutions used according freeze-thaw lysis methods, may further comprise one or more lysis agents, solubilizing agents, buffering agents, cryoprotectants, surfactants, preservatives, enzymes, enzyme inhibitors and/or chelators. Once cell solutions subjected to freezing are thawed, such components may enhance the recovery of desired cellular products. In some cases, one or more cyroprotectants are included in cell solutions undergoing freeze-thaw lysis. As used herein, the term “cryoprotectant” refers to an agent used to protect one or more substance from damage due to freezing. Cryoprotectants may include any of those taught in US Publication No. US2013/0323302 or U.S. Pat. Nos. 6,503,888, 6,180,613, 7,888,096, 7,091,030, the contents of each of which are herein incorporated by reference in their entirety. In some cases, cryoprotectants may include, but are not limited to dimethyl sulfoxide, 1,2-propanediol, 2,3-butanediol, formamide, glycerol, ethylene glycol, 1,3-propanediol and n-dimethyl formamide, polyvinylpyrrolidone, hydroxyethyl starch, agarose, dextrans, inositol, glucose, hydroxyethylstarch, lactose, sorbitol, methyl glucose, sucrose and urea. In some embodiments, freeze-thaw lysis may be carried out according to any of the methods described in U.S. Pat. No. 7,704,721, the contents of which are herein incorporated by reference in their entirety.

[0194] As used herein, the term “lysis force” refers to a physical activity used to disrupt a cell. Lysis forces may include, but are not limited to mechanical forces, sonic forces, gravitational forces, optical forces, electrical forces and the like. Cell lysis carried out by mechanical force is referred to herein as “mechanical lysis.” Mechanical forces that may be used according to mechanical lysis may include high shear fluid forces. According to such methods of mechanical lysis, a microfluidizer may be used. Microfluidizers typically comprise an inlet reservoir where cell solutions may be applied. Cell solutions may then be pumped into an interaction chamber via a pump (e.g. high-pressure pump) at high speed and/or pressure to produce shear fluid forces. Resulting lysates may then be collected in one or more output reservoir. Pump speed and/or pressure may be adjusted to modulate cell lysis and enhance recovery of products (e.g. viral particles.) Other mechanical lysis methods may include physical disruption of cells by scraping.

[0195] Cell lysis methods may be selected based on the cell culture format of cells to be lysed. For example, with adherent cell cultures, some chemical and mechanical lysis methods may be used. Such mechanical lysis methods may include freeze-thaw lysis or scraping. In another example, chemical lysis of adherent cell cultures may be carried out through incubation with lysis solutions comprising surfactant, such as Triton-X-100. In some cases, cell lysates generated from adherent cell cultures may be treated with one more nuclease to lower the viscosity of the lysates caused by liberated DNA.

[0196] In one embodiment, a method for harvesting AAV particles without lysis may be used for efficient and scalable AAV particle production. In a non-limiting example, AAV particles may be produced by culturing an AAV particle lacking a heparin binding site, thereby allowing the AAV particle to pass into the supernatant, in a cell culture, collecting supernatant from the culture; and isolating the AAV particle from the supernatant, as described in US Patent Application 20090275107, the contents of which are incorporated herein by reference in their entirety.

### Clarification

[0197] Cell lysates comprising viral particles may be subjected to clarification. Clarification refers to initial steps taken in purification of viral particles from cell lysates. Clarification serves to prepare lysates for further purification by removing larger, insoluble debris. Clarification steps may include, but are not limited to centrifugation and filtration. During clarification, centrifugation may be carried out at low speeds to remove larger debris, only. Similarly, filtration may be carried out using filters with larger pore sizes so that only larger debris is removed. In some cases, tangential flow filtration may be used during clarification. Objectives of viral clarification include high throughput processing of cell lysates and to optimize ultimate viral recovery. Advantages of including a clarification step include scalability for processing of larger volumes of lysate. In some embodiments, clarification may be carried out according to any of the methods presented in U.S. Pat. Nos. 8,524,446, 5,756,283, 6,258,595, 6,261,551, 6,270,996, 6,281,010, 6,365,394, 6,475,769, 6,482,634, 6,485,966, 6,943,019, 6,953,690, 7,022,519, 7,238,526, 7,291,498, 7,491,508, US Publication Nos. US2013/0045186, US2011/0263027, US2011/0151434, US2003/0138772, and International Publication Nos. WO2002012455, WO1996039530, WO1998010088, WO1999014354, WO1999015685, WO1999047691, WO2000055342, WO2000075353 and WO2001023597, the contents of each of which are herein incorporated by reference in their entirety.

[0198] Methods of cell lysate clarification by filtration are well understood in the art and may be carried out according to a variety of available methods including, but not limited to passive filtration and flow filtration. Filters used may comprise a variety of materials and pore sizes. For example, cell lysate filters may comprise pore sizes of from about 1 μM to about 5 from about 0.5 μM to about 2 from about 0.1 μM to about 1 from about 0.05 μM to about 0.05 μM and from about 0.001 μM to about 0.1 μM. Exemplary pore sizes for cell lysate filters may include, but are not limited to, 2.0, 1.9, 1.8, 1.7, 1.6, 1.5, 1.4, 1.3, 1.2, 1.1, 1, 0.9, 0.8, 0.7, 0.6, 0.5, 0.4, 0.3, 0.2, 0.1, 0.95, 0.9, 0.85, 0.8, 0.75, 0.7, 0.65, 0.6, 0.55, 0.5, 0.45, 0.4, 0.35, 0.3, 0.25, 0.2, 0.15, 0.1, 0.05, 0.22, 0.21, 0.20, 0.19, 0.18, 0.17, 0.16, 0.15, 0.14, 0.13, 0.12, 0.11, 0.1, 0.09, 0.08, 0.07, 0.06, 0.05, 0.04, 0.03, 0.02, 0.01, 0.02, 0.019, 0.018, 0.017, 0.016, 0.015, 0.014, 0.013, 0.012, 0.011, 0.01, 0.009, 0.008, 0.007, 0.006, 0.005, 0.004, 0.003, 0.002, 0.001 and 0.001 μM. In one embodiment, clarification may comprise filtration through a filter with 2.0 μM pore size to remove large debris, followed by passage through a filter with 0.45 μM pore size to remove intact cells.

[0199] Filter materials may be composed of a variety of materials. Such materials may include, but are not limited to polymeric materials and metal materials (e.g. sintered metal and pored aluminum.) Exemplary materials may include, but are not limited to nylon, cellulose materials (e.g. cellulose acetate), polyvinylidene fluoride (PVDF), polyethersulfone, polyamide, polysulfone, polypropylene, and polyethylene terephthalate. In some cases, filters useful for clarification of cell lysates may include, but are not limited to ULTIPLEAT PROFILE™ filters (Pall Corporation, Port Washington, N.Y.), SUPOR™ membrane filters (Pall Corporation, Port Washington, N.Y.).

[0200] In some cases, flow filtration may be carried out to increase filtration speed and/or effectiveness. In some cases, flow filtration may comprise vacuum filtration. According to such methods, a vacuum is created on the side of the filter opposite that of cell lysate to be filtered. In some cases, cell lysates may be passed through filters by centrifugal forces. In some cases, a pump is used to force cell lysate through clarification filters. Flow rate of cell lysate through one or more filters may be modulated by adjusting one of channel size and/or fluid pressure.

[0201] According to some embodiments, cell lysates may be clarified by centrifugation. Centrifugation may be used to pellet insoluble particles in the lysate. During clarification, centrifugation strength (expressed in terms of gravitational units (g), which represents multiples of standard gravitational force) may be lower than in subsequent purification steps. In some cases, centrifugation may be carried out on cell lysates at from about 200 g to about 800 g, from about 500 g to about 1500 g, from about 1000 g to about 5000 g, from about 1200 g to about 10000 g or from about 8000 g to about 15000 g. In some embodiments, cell lysate centrifugation is carried out at 8000 g for 15 minutes. In some cases, density gradient centrifugation may be carried out in order to partition particulates in the cell lysate by sedimentation rate. Gradients used according to methods of the present disclosure may include, but are not limited to cesium chloride gradients and iodixanol step gradients.

### Purification: Chromatography

[0202] In some cases, AAV particles may be purified from clarified cell lysates by one or more methods of chromatography. Chromatography refers to any number of methods known in the art for separating out one or more elements from a mixture. Such methods may include, but are not limited to ion exchange chromatography (e.g. cation exchange chromatography and anion exchange chromatography), immunoaffinity chromatography and size-exclusion chromatography. In some embodiments, methods of viral chromatography may include any of those taught in U.S. Pat. Nos. 5,756,283, 6,258,595, 6,261,551, 6,270,996, 6,281,010, 6,365,394, 6,475,769, 6,482,634, 6,485,966, 6,943,019, 6,953,690, 7,022,519, 7,238,526, 7,291,498 and 7,491,508 or International Publication Nos. WO1996039530, WO1998010088, WO1999014354, WO1999015685, WO1999047691, WO2000055342, WO2000075353 and WO2001023597, the contents of each of which are herein incorporated by reference in their entirety.

[0203] In some embodiments, ion exchange chromatography may be used to isolate viral particles. Ion exchange chromatography is used to bind viral particles based on charge-charge interactions between capsid proteins and charged sites present on a stationary phase, typically a column through which viral preparations (e.g. clarified lysates) are passed. After application of viral preparations, bound viral particles may then be eluted by applying an elution solution to disrupt the charge-charge interactions. Elution solutions may be optimized by adjusting salt concentration and/or pH to enhance recovery of bound viral particles. Depending on the charge of viral capsids being isolated, cation or anion exchange chromatography methods may be selected. Methods of ion exchange chromatography may include, but are not limited to any of those taught in U.S. Pat. Nos. 7,419,817, 6,143,548, 7,094,604, 6,593,123, 7,015,026 and 8,137,948, the contents of each of which are herein incorporated by reference in their entirety.

[0204] In some embodiments, immunoaffinity chromatography may be used. Immunoaffinity chromatography is a form of chromatography that utilizes one or more immune compounds (e.g. antibodies or antibody-related structures) to retain viral particles. Immune compounds may bind specifically to one or more structures on viral particle surfaces, including, but not limited to one or more viral coat protein. In some cases, immune compounds may be specific for a particular viral variant. In some cases, immune compounds may bind to multiple viral variants. In some embodiments, immune compounds may include recombinant single-chain antibodies. Such recombinant single chain antibodies may include those described in Smith, R. H. et al., 2009. Mol. Ther. 17(11):1888-96, the contents of which are herein incorporated by reference in their entirety. Such immune compounds are capable of binding to several AAV capsid variants, including, but not limited to AAV1, AAV2, AAV6 and AAV8.

[0205] In some embodiments, size-exclusion chromatography (SEC) may be used. SEC may comprise the use of a gel to separate particles according to size. In viral particle purification, SEC filtration is sometimes referred to as “polishing.” In some cases, SEC may be carried out to generate a final product that is near-homogenous. Such final products may in some cases be used in pre-clinical studies and/or clinical studies (Kotin, R. M. 2011. Human Molecular Genetics. 20(1):R2-R6, the contents of which are herein incorporated by reference in their entirety.) In some cases, SEC may be carried out according to any of the methods taught in U.S. Pat. Nos. 6,143,548, 7,015,026, 8,476,418, 6,410,300, 8,476,418, 7,419,817, 7,094,604, 6,593,123, and 8,137,948, the contents of each of which are herein incorporated by reference in their entirety.

[0206] In one embodiment, the compositions comprising at least one AAV particle may be isolated or purified using the methods described in U.S. Pat. No. 6,146,874, the contents of which are herein incorporated by reference in their entirety.

[0207] In one embodiment, the compositions comprising at least one AAV particle may be isolated or purified using the methods described in U.S. Pat. No. 6,660,514, the contents of which are herein incorporated by reference in their entirety.

[0208] In one embodiment, the compositions comprising at least one AAV particle may be isolated or purified using the methods described in U.S. Pat. No. 8,283,151, the contents of which are herein incorporated by reference in their entirety.

[0209] In one embodiment, the compositions comprising at least one AAV particle may be isolated or purified using the methods described in U.S. Pat. No. 8,524,446, the contents of which are herein incorporated by reference in their entirety.

### Methods of Use

### Gene Silencing: Knockdown Approach

[0210] When designed to inhibit or silence a gene, the AAV particles of the present disclosure may also comprise a viral genome that encodes a polynucleotide payload which may be processed to produce an siRNA, miRNA or other double stranded (ds) or single stranded (ss) gene modulatory motif.

[0211] Accordingly, the siRNA duplexes or dsRNA can be used to substantially inhibit gene expression in a cell, in particular cells of the CNS. In some aspects, the inhibition of gene expression refers to an inhibition by at least about 20%, preferably by at least about 30%, 40%, 50%, 60%, 70%, 80%, 85%, 90%, 95% and 100%. Accordingly, the protein product of the targeted gene may be inhibited by at least about 20%, preferably by at least about 30%, 40%, 50%, 60%, 70%, 80%, 85%, 90%, 95% and 100%. The gene can be either a wild type gene or a mutated gene with at least one mutation. Accordingly, the protein is either wild type protein or a mutated polypeptide with at least one mutation.

[0212] In some embodiments, the present disclosure provides methods for treating or ameliorating AADC Deficiency (AADCD) and related childhood monoamine neurotransmitter disorders in a subject in need of treatment, the method comprising administering to the subject an effective amount of at least one AAV particle comprising a viral genome encoding an siRNA duplex targeting the abnormal gene and/or protein, delivering duplex into targeted cells, inhibiting the gene expression and protein production, and ameliorating symptoms of the disease or condition in the subject.

### Treatment and Pharmaceutical Compositions

[0213] The present disclosure additionally provides a method for treating AADC Deficiency (AADCD) and related childhood monoamine neurotransmitter disorders in a mammalian subject, including a human subject, comprising administering to the subject any of the AAV polynucleotides or AAV genomes described herein (i.e., “viral genomes” or “VGs”) or administering to the subject a particle comprising said AAV polynucleotide or AAV genome, or administering to the subject any of the described compositions, including pharmaceutical compositions.

[0214] As used herein the term “composition” comprises an AAV polynucleotide or AAV genome or AAV particle and at least one excipient.

[0215] As used herein the term “pharmaceutical composition” comprises an AAV polynucleotide or AAV genome or AAV particle and one or more pharmaceutically acceptable excipients.

[0216] Although the descriptions of pharmaceutical compositions, e.g., those AAV particles or viral vectors comprising an AADC-encoding polynucleotide payload e.g., those (including the encoding plasmids or expression vectors, such as viruses, e.g., AAV) comprising a payload, e.g., AADC encoding sequences, to be delivered, provided herein are principally directed to pharmaceutical compositions which are suitable for administration to humans, it will be understood by the skilled artisan that such compositions are generally suitable for administration to any other animal, e.g., to non-human animals, e.g. non-human mammals. Modification of pharmaceutical compositions suitable for administration to humans in order to render the compositions suitable for administration to various animals is well understood, and the ordinarily skilled veterinary pharmacologist can design and/or perform such modification with merely ordinary, if any, experimentation. Subjects to which administration of the pharmaceutical compositions is contemplated include, but are not limited to, humans and/or other primates; mammals, including commercially relevant mammals such as cattle, pigs, horses, sheep, cats, dogs, mice, rats, birds, including commercially relevant birds such as poultry, chickens, ducks, geese, and/or turkeys.

[0217] In some embodiments, compositions are administered to humans, human patients or subjects. For the purposes of the present disclosure, the phrase “active ingredient” generally refers either to the AAV particle or viral vector carrying the payload or to the polynucleotide payload delivered by the AAV particle or viral vector as described herein.

[0218] In some embodiments, the compositions are administered to pediatric humans. In some embodiments the pediatric humans are between the ages of about 1 month and about 18 years. In some embodiments, the pediatric humans are between the ages of about 1 year and about 12 years. In some embodiments, the pediatric patients are between about 2 years and about 8 years. In some embodiments, the pediatric patients are between about 4 years and about 6 years.

[0219] In one embodiment, the compositions described herein are administered to a subject who has been diagnosed with AADC deficiency.

[0220] In one embodiment, the compositions described herein are used to decrease motor manifestations of AADC deficiency such as, but not limited to, hypotonia, marked motor delay, and/or involuntary movements such as dystonia and oculogyric crises. The decrease may be for a period of time (e.g., minutes, hours, days, weeks or years) or a reduction in the occurrence of the activity (e.g., a reduction by at least 1%, 5%, 10%, 15%, 20%, 30%, 40%, 50%, 60%, 70%, 80%, 90%, or more than 90%).

[0221] In one embodiment, the compositions described herein are used to decrease non-motor manifestations of AADC deficiency such as, but not limited to, autonomic disturbances, emotional liability, cognitive impairment and/or sleep disturbances. The decrease may be for a period of time (e.g., minutes, hours, days, weeks or years) or a reduction in the occurrence of the activity (e.g., a reduction by at least 1%, 5%, 10%, 15%, 20%, 30%, 40%, 50%, 60%, 70%, 80%, 90%, or more than 90%).

[0222] In one embodiment, the composition described herein is administered to a subject who has received dopaminergic therapy. As a non-limiting example, the subject may have a limited response to dopaminergic therapy.

[0223] In one embodiment, the composition of the present disclosure is used as described by Hwu and colleagues (Hwu, W. L., et al., 2012. Gene therapy for aromatic L-amino acid decarboxylase deficiency. Sci. Transl. Med. Vol. 4, 134ra61, the contents of which are herein incorporated by reference in their entirety), wherein four AADCD patients were treated with parenchymal delivery to the putamen of a recombinant AAV2 carrying human AADC. Components of the AAV2-hAADC vector included a cytomegalovirus immediate early gene promoter, the first intron of human growth factor, human AADC complementary DNA (cDNA), and a simian virus 40 polyadenylation signal. Each of the patients had mutations in the DDC gene (IVS6+4 A>T, or the less common c.1927_1298insA), known to cause AADCD. Prior to treatment, patients were bed-ridden and displayed little to no spontaneous movement. After treatment, patients showed increased motor and cognitive performance as evaluated by the Alberta Infant Motor Scale (AIMS), Peabody Developmental Motor Scale (PDMS-II) and the Comprehensive Developmental Inventory for Infants and Toddlers (CDIIT). At 16 months subsequent to treatment, one patient was able to stand with assistance. Patients also showed improvement in non-motor symptoms, such as the occurrence of oculogyric crises, increased emotional stability and improvements in sweating and hypothermic conditions. Evaluations of neurotransmitters and their metabolites by PET and HPLC demonstrated increased dopamine, serotonin, homovanillic acid (HVA) and 5-hydroxyindoleactic acid (HIAA). Disadvantages to this approach included limited transduction of the vector to a small region of the putamen and increased anti-AAV2 neutralizing antibodies following treatment. In a non-limiting example, the viral particle of the present disclosure is an AAV2-CMV-hGH intron-hAADC-SV40 poly(A) vector. In a non-limiting example, use of the AAV particles of the present disclosure result in increased scores on the AIMS, PDMS-II and CDIIT evaluations. In another non-limiting example, administration of the AAV particles of the present disclosure results in improved motor and cognitive behavior in AADCD patients. In one embodiment, administration of the AAV particle of the present disclosure, leads to improved scores on AIMS, PDMS-II and/or CDIIT. In a non-limiting example the score increases 10 points. In another non-limiting example, the score increases 1 point. In another non-limiting example, the score increases 1, 2, 3, 4, 5, 6, 7, 8, 9, 10, 11, 12, 13, 14, 15, 16, 17, 18, 19, or 20 points. In another non-limiting example, use of the AAV particles of the present disclosure results in increased dopamine and serotonin levels. In one embodiment, the AAV particle of the present disclosure may be used as a gene therepy in the treatment of Parkinson's Disease, as described by Hwu and colleagues (Hwu, W. L., et al., 2012. Gene therapy for aromatic L-amino acid decarboxylase deficiency. Sci. Transl. Med. Vol. 4, 134ra61).

[0224] In one embodiment, the AAV particle of the present disclosure may be or is as described in United States Publication No. US20120220648, the contents of which are herein incorporated by reference in their entirety. The AAV2-hAADC of SEQ ID NO: 1 of US20120220648 comprises a cytomegalovirus immediate early gene promoter, a β globin intron, a human AADC polynucleotide, and a simian virus 40 polyadenylation signal between two AAV2 ITRs with kanamycin resistance. As a non-limiting example, the AAV particle of the present disclosure may comprise any part of SEQ ID NO: 1 of US20120220648 or a variant thereof.

[0225] In one embodiment, the AAV particle of the present disclosure may be used in a compassionate treatment or clinical trial. As a non-limiting example of a compassionate treatment trial, Hwu and colleagues treated 8 patients with AADCD with AAV2-hAADC gene therapy. Treatment improved motor performance in all patients (4 able to stand with support, 3 able to sit with support), with the longest follow up exceeding four years following treatment. Further, no virus-associated toxicity has been identified. An ongoing Phase I/11 clinical trial (NCT01395641, the contents of which are herein incorporated by reference in their entirety) by the same team is being used to assess the safety and efficacy of AAV2-hAADC treatment in patients with AADCD. Stereotactic surgery will be used to inject AAV2-hAADC bilaterally into the putamen (intracerebral infusion) of AADCD patients. Primary outcomes include increases in CSF levels of neurotransmitter metabolites HVA or HVIAA at a year post-treatment as well as an increase of 10 points or more on the PDMS-II. Secondary outcomes include safety measures of post-surgery intracerebral hemorrhage, post-surgery CSF leakage and severity of post-gene therapy dyskinesia and efficacy end points of body weight gain, increased signal in the putamen as measured by DOPA-PET (signal of de novo dopamine production), and increased score in other motor or developmental evaluations. The Clinical Trials registry indicates an estimated enrollment of 10 patients with a study completion date of September 2016.

[0226] In one embodiment, the AAV particle of the present disclosure is and is used to treat AADCD as described in Clinical Trial No. NCT01395641, the contents of which are herein incorporated by reference in their entirety.

[0227] In one embodiment, the AAV particle of the present disclosure is an AAV-hAADC, also known as AGIL-AADC, as described by Agilis Biotherapeutics.

[0228] In one embodiment, the AAV particle of the present disclosure is an AAV-hAADC, also known as AGIL-AADC, as described by Agilis Biotherapeutics and is the same as used in clinical trials by Hwu and colleagues, described herein.

[0229] The AAV particles of the present disclosure may be used or tested in any AADC animal model, including, but not limited to the Ddc mouse as described in Lee, N.C., et al 2013 Regulation of the dopaminergic system in a murine model of aromatic L-amino acid decarboxylase deficiency. Neurobiol. Dis. 52:177-190; Lee, N.C., et al., 2015 Benefits of neuronal preferential systemic gene therapy for neurotransmitter deficiency. Mol. Ther. Vol. 23(10), 1572-1581; Lee, N.C., et al., 2013 Treatment of congenital neurotransmitter deficiencies by intracerebral ventricular injection of an adeno-associated virus serotype 9 vector. Hum. Gen. Ther. 25:189-198; and Hwu, W. L., et al., 2013 AADC deficiency: occurring in humans, modeled in rodents. Adv Pharmacol 68:273-284, the contents of each of which are herein incorporated by reference in their entirety. Non-limiting examples of animal models of AADC deficiency include mouse, non-human primate, rat, ferret, zebrafish, drosophila or c. elegans.

[0230] Based on the IVS6+4A>T mutation known to cause AADCD, a mouse model was created (Ddc^{KI} mice), in which a splicing mutation was knocked into the Ddc gene, along with a neomycin-resistance gene, to generate exon 6 skipping in the mRNA (Lee, N.C., et al 2013 Regulation of the dopaminergic system in a murine model of aromatic L-amino acid decarboxylase deficiency. Neurobiol. Dis. 52:177-190; Lee, N.C., et al., 2015 Benefits of neuronal preferential systemic gene therapy for neurotransmitter deficiency. Mol. Ther. Vol. 23(10), 1572-1581; Lee, N.C., et al., 2013 Treatment of congenital neurotransmitter deficiencies by intracerebral ventricular injection of an adeno-associated virus serotype 9 vector. Hum. Gen. Ther. 25:189-198; and Hwu, W. L., et al., 2013 AADC deficiency: occurring in humans, modeled in rodents. Adv Pharmacol 68:273-284, the contents of each of which are herein incorporated by reference in their entirety). Mouse Ddc knockout causes embryonic lethality, making this strategy not viable as an option for design of a mouse model. Meanwhile, the human IVS6+4A>T DDC gene mutation is known to interrupt the consensus sequence in intron 6, thereby causing inappropriate splicing. Homozygous knock-in mice survive into adulthood and are phenotypically similar to the clinical presentation of AADCD. Ddc mice demonstrate disturbed weight gain, decreased survival and numerous behavioral, motor and autonomic dysfunctions. Interestingly, these mice show signs of spontaneous recovery with age, introducing a distinct caveat into this animal model.

[0231] Treatment of neonatal (P0) Ddc mice by intracerebroventricular injection of AAV9-hAADC yielded improvements in weight gain, survival, dopamine and serotonin levels, cardiovascular function and motor behavior. The AAV9-AADC comprised a ubiquitous cytomegalovirus immediate early gene promoter, the first intron of human growth hormone, human AADC cDNA (NM 000790), a simian virus 40 polyadenylation signal, AAV2 ITRs and an AAV9 capsid. The AAV9-AADC vector was delivered by bilateral infusions of 2×10¹⁰ vg in 24, to the lateral ventricles using a Hamilton syringe. Despite some improvements in the Ddc^{KI} mice, delivery of the AAV9-AADC resulted in a hyperactivity, thereby negating some of the therapeutic benefit. (see Lee, N.C., et al., 2013 Treatment of congenital neurotransmitter deficiencies by intracerebral ventricular injection of an adeno-associated virus serotype 9 vector. Hum. Gen. Ther. 25:189-198, the contents of which are herein incorporated by reference in their entirety).

[0232] Translation of neonatal ICV injections to larger animals or human patients is challenging given the time frame of the development of the cranial bones and the blood brain barrier. In a follow-up study, treatment of young 7 day old Ddc^{M} mice by intraperitoneal injection (systemic delivery) with AAV-AADC resulted in improvements in weight gain, survival, dopamine and serotonin levels, cardiovascular function, and motor and behavioral function. Two AAV-AADC vectors were tested, one that targeted neurons specifically and the other, previously described AAV9-AADC, which showed more ubiquitous targeting. Of the two vectors, the neuronal targeting vector showed superior efficacy in treating the Ddc^{KI} mice. The neuronal targeting AAV-AADC (AAVN-AADC) comprised a synapsin-I promoter for neuronal targeting, mouse AADC (NM 016672.4), a woodchuck hepatitis virus post-transcriptional regulatory element, AAV3 ITRs and an AAV9 capsid with a tyrosine to phenylalanine substitution at position 446 of the AAV9 capsid sequence.

[0233] In one embodiment, the AAV particle of the present disclosure is an AAVN-AADC, comprising a synapsin-I promoter, an AADC polynucleotide, a woodchuck hepatitis virus post-transcriptional regulatory element, AAV3 ITRs and an AAV9 capsid as described in Lee, N.C., et al., 2015 Benefits of neuronal preferential systemic gene therapy for neurotransmitter deficiency. Mol. Ther. Vol. 23(10), 1572-1581, the contents of which are herein incorporated by reference in their entirety. In one embodiment the AADC polynucleotide is a mouse AADC. In another embodiment the AADC polynucleotide is a human AADC.

[0234] In one embodiment, the AAV particle of the present disclosure is an AAV9-AADC, comprising a ubiquitous CMV promoter, the first intron of human growth hormone, an AADC polynucleotide, an SV40 poly(A), AAV2 ITRs and an AAV9 capsid, as described in Lee, N.C., et al., 2015 Benefits of neuronal preferential systemic gene therapy for neurotransmitter deficiency. Mol. Ther. Vol. 23(10), 1572-1581, the contents of which are herein incorporated by reference in their entirety. In one embodiment the AADC polynucleotide is a mouse AADC. In another embodiment the AADC polynucleotide is a human AADC.

[0235] The AAV particle of the present disclosure may be an AAV2-hAADC, AAVN-AADC, or AAV9-AADC as described in United States Publication No. US20120220648; Hwu, W. L., et al., 2012 Gene therapy for aromatic L-amino acid decarboxylase deficiency. Sci. Transl. Med. Vol. 4, 134ra61; Lee, N.C., et al., 2013 Treatment of congenital neurotransmitter deficiencies by intracerebral ventricular injection of an adeno-associated virus serotype 9 vector. Hum. Gen. Ther. 25:189-198; and Lee, N.C., et al., 2015 Benefits of neuronal preferential systemic gene therapy for neurotransmitter deficiency. Mol. Ther. Vol. 23(10), 1572-1581, the contents of each of which are herein incorporated by reference in their entirety. In certain embodiments, the AAV particle includes a cytomegalovirus (CMV) immediate-early promoter followed by the first intron of human growth hormone, human AADC complementary DNA (cDNA), and the simian virus 40 polyadenylation (SV40 PolyA) signal sequence.

### Circadian Rhythm and Sleep-Wake Cycles

[0236] Circadian rhythms are physical, mental and behavioral changes that tend to follow a 24 hour cycle. Circadian rhythms can influence sleep-wake cycles, hormone release, body temperature and other bodily functions. Changes in the circadian rhythm can cause conditions and/or disorder such as, but not limited to sleep disorders (e.g., insomnia), depression, bipolar disorder, seasonal affective disorder, obesity and diabetes.

[0237] In one embodiment, the AADC polynucleotides described herein may be used to treat insomnia.

[0238] The sleep-wake cycle comprises periods of sleep and periods of wake. Generally, in a 24 hours period the total hours of sleep are less than the total hours of wakefulness. As a non-limiting example, the sleep-wake cycle comprises 7-9 hours of sleep and 15-17 hours of wakefulness. As a non-limiting example, the sleep-wake cycle comprises 8 hours of sleep and 16 hours of wakefulness. As a non-limiting example, the sleep-wake cycle comprises 8-10 hours of sleep and 14-16 hours of wakefulness.

[0239] In one embodiment, the sleep-wake cycle of a subject is improved by administration to the subject of the AADC polynucleotides described herein.

[0240] In one embodiment, the sleep-wake cycle of a subject is regulated by administration to the subject of the AADC polynucleotides described herein. As a non-limiting example, the regulation may be the correction of more periods of sleep occurring at night and less periods of sleep occurring during the day.

[0241] In one embodiment, the sleep-wake cycle of a subject administered the AADC polynucleotides described herein improves as compared to the sleep-wake cycle of the subject prior to administration of the AADC polynucleotides. As a non-limiting example, the subject has an increased period of sleep and a decreased period of wakefulness. As another non-limiting example, the subject has a decreased period of sleep and an increased period of wakefulness.

[0242] In one embodiment, the sleep-wake cycle of a subject administered the AADC polynucleotides described herein is regulated as compared to the sleep-wake cycle of the subject prior to administration of the AADC polynucleotides. As a non-limiting example, the length of the periods of sleep and the periods of wakefulness may be about the same (e.g., +/−1 hour) for at least 2 days. As another non-limiting example, the length of the periods of sleep and the periods of wakefulness if a 24 hours period may be within 10 minutes, 15 minutes, 20 minutes, 25 minutes, 30 minutes, 35 minutes, 40 minutes, 45 minutes, 50 minutes, 55 minutes, 1 hour, 1.5 hours, or 2 hours of the previous 24 hour period.

[0243] In one embodiment, the amount of rapid eye movement (REM) sleep a subject experiences in a 24 hour period is altered after the subject is administered the AADC polynucleotides described herein. REM sleep is generally considered an active period of sleep marked by intense brain activity where brain waves are fast and desynchronized. An adult, on average, spends about 20-25% of their total daily sleep period in REM sleep. As a non-limiting example, the amount of REM sleep is decreased by 1%, 2%, 3%, 4%, 5%, 6%, 7%, 8%, 9%, 10%, 11%, 12%, 13%, 14%, 15%, 20%, 25%, 30%, 35%, 40%, 45%, 50%, 55%, 60%, 65% or more than 65%. As a non-limiting example, the amount of REM sleep is decreased by 1-10%, 5-10%, 5-15%, 10-15%, 15-20%, 15-25%, 20-25%, 20-30%, 25-30%, 25-35%, 30-35%, 30-40%, 35-40%, 40-50% or 40-60%. As a non-limiting example, the amount of REM sleep is increased by 1%, 2%, 3%, 4%, 5%, 6%, 7%, 8%, 9%, 10%, 11%, 12%, 13%, 14%, 15%, 20%, 25%, 30%, 35%, 40%, 45%, 50%, 55%, 60%, 65% or more than 65%. As a non-limiting example, the amount of REM sleep is increased by 1-5%, 1-10%, 5-10%, 5-15%, 10-15%, 15-20%, 15-25%, 20-25%, 20-30%, 25-30%, 25-35%, 30-35%, 30-40%, 35-40%, 40-50% or 40-60%.

[0244] In one embodiment, the amount of non-REM (NREM) sleep a subject experiences in a 24 hour period is altered after the subject is administered the AADC polynucleotides described herein. NREM sleep is generally characterized by a reduction in physiological activity since the brain waves, as measured by EEG, get slower and have greater amplitude. NREM has four stages: Stage 1 is the time of drowsiness or transition from being awake to falling asleep where the brain waves and muscle activity begin to slow; Stage 2 is a period of light sleep during which eye movements stop and brain waves become slower with occasional bursts of rapid waves (sometimes called sleep spindles); Stage 3 and Stage 4 (collectively referred to as slow wave sleep) are characterized by the presence of slow brain waves (delta waves) interspersed with smaller faster waves where there are no eye movements. An adult, on average, spends about 75-80% of their total daily sleep period in NREM sleep with about half of their total daily sleep time in NREM stage 2 sleep.

[0245] In one embodiment, the amount of NREM sleep a subject experiences is altered after the subject is administered the AADC polynucleotides described herein. As a non-limiting example, the amount of NREM sleep is decreased by 1%, 2%, 3%, 4%, 5%, 6%, 7%, 8%, 9%, 10%, 11%, 12%, 13%, 14%, 15%, 20%, 25%, 30%, 35%, 40%, 45%, 50%, 55%, 60%, 65% or more than 65%. As a non-limiting example, the amount of NREM sleep is decreased by 1-10%, 5-10%, 5-15%, 10-15%, 15-20%, 15-25%, 20-25%, 20-30%, 25-30%, 25-35%, 30-35%, 30-40%, 35-40%, 40-50% or 40-60%. As a non-limiting example, the amount of NREM sleep is increased by 1%, 2%, 3%, 4%, 5%, 6%, 7%, 8%, 9%, 10%, 11%, 12%, 13%, 14%, 15%, 20%, 25%, 30%, 35%, 40%, 45%, 50%, 55%, 60%, 65% or more than 65%. As a non-limiting example, the amount of NREM sleep is increased by 1-5%, 1-10%, 5-10%, 5-15%, 10-15%, 15-20%, 15-25%, 20-25%, 20-30%, 25-30%, 25-35%, 30-35%, 30-40%, 35-40%, 40-50% or 40-60%.

[0246] In one embodiment, the amount of NREM Stage 1 sleep a subject experiences is altered after the subject is administered the AADC polynucleotides described herein. As a non-limiting example, the amount of NREM Stage 1 sleep is decreased by 1%, 2%, 3%, 4%, 5%, 6%, 7%, 8%, 9%, 10%, 11%, 12%, 13%, 14%, 15%, 20%, 25%, 30%, 35%, 40%, 45%, 50%, 55%, 60%, 65% or more than 65%. As a non-limiting example, the amount of NREM Stage 1 sleep is decreased by 1-10%, 5-10%, 5-15%, 10-15%, 15-20%, 15-25%, 20-25%, 20-30%, 25-30%, 25-35%, 30-35%, 30-40%, 35-40%, 40-50% or 40-60%. As a non-limiting example, the amount of NREM Stage 1 sleep is increased by 1%, 2%, 3%, 4%, 5%, 6%, 7%, 8%, 9%, 10%, 11%, 12%, 13%, 14%, 15%, 20%, 25%, 30%, 35%, 40%, 45%, 50%, 55%, 60%, 65% or more than 65%. As a non-limiting example, the amount of NREM Stage 1 sleep is increased by 1-5%, 1-10%, 5-10%, 5-15%, 10-15%, 15-20%, 15-25%, 20-25%, 20-30%, 25-30%, 25-35%, 30-35%, 30-40%, 35-40%, 40-50% or 40-60%.

[0247] In one embodiment, the amount of NREM Stage 2 sleep a subject experiences is altered after the subject is administered the AADC polynucleotides described herein. As a non-limiting example, the amount of NREM Stage 2 sleep is decreased by 1%, 2%, 3%, 4%, 5%, 6%, 7%, 8%, 9%, 10%, 11%, 12%, 13%, 14%, 15%, 20%, 25%, 30%, 35%, 40%, 45%, 50%, 55%, 60%, 65% or more than 65%. As a non-limiting example, the amount of NREM Stage 2 sleep is decreased by 1-10%, 5-10%, 5-15%, 10-15%, 15-20%, 15-25%, 20-25%, 20-30%, 25-30%, 25-35%, 30-35%, 30-40%, 35-40%, 40-50% or 40-60%. As a non-limiting example, the amount of NREM Stage 2 sleep is increased by 1%, 2%, 3%, 4%, 5%, 6%, 7%, 8%, 9%, 10%, 11%, 12%, 13%, 14%, 15%, 20%, 25%, 30%, 35%, 40%, 45%, 50%, 55%, 60%, 65% or more than 65%. As a non-limiting example, the amount of NREM Stage 2 sleep is increased by 1-5%, 1-10%, 5-10%, 5-15%, 10-15%, 15-20%, 15-25%, 20-25%, 20-30%, 25-30%, 25-35%, 30-35%, 30-40%, 35-40%, 40-50% or 40-60%.

[0248] In one embodiment, the amount of NREM Stage 3 and 4 sleep a subject experiences is altered after the subject is administered the AADC polynucleotides described herein. As a non-limiting example, the amount of NREM Stage 3 and 4 sleep is decreased by 1%, 2%, 3%, 4%, 5%, 6%, 7%, 8%, 9%, 10%, 11%, 12%, 13%, 14%, 15%, 20%, 25%, 30%, 35%, 40%, 45%, 50%, 55%, 60%, 65% or more than 65%. As a non-limiting example, the amount of NREM Stage 3 and 4 sleep is decreased by 1-10%, 5-10%, 5-15%, 10-15%, 15-20%, 15-25%, 20-25%, 20-30%, 25-30%, 25-35%, 30-35%, 30-40%, 35-40%, 40-50% or 40-60%. As a non-limiting example, the amount of NREM Stage 3 and 4 sleep is increased by 1%, 2%, 3%, 4%, 5%, 6%, 7%, 8%, 9%, 10%, 11%, 12%, 13%, 14%, 15%, 20%, 25%, 30%, 35%, 40%, 45%, 50%, 55%, 60%, 65% or more than 65%. As a non-limiting example, the amount of NREM Stage 3 and 4 sleep is increased by 1-5%, 1-10%, 5-10%, 5-15%, 10-15%, 15-20%, 15-25%, 20-25%, 20-30%, 25-30%, 25-35%, 30-35%, 30-40%, 35-40%, 40-50% or 40-60%.

[0249] In one embodiment, periods of NREM and REM cycles are more consistent in a subject after the subject is administered the AADC polynucleotides described herein. Generally NREM and REM cycles alternate every 90 to 110 minutes four to six times per night.

### Formulation and Delivery

### Formulation

[0250] The AAV particles or viral vectors can be formulated using one or more excipients to: (1) increase stability; (2) increase cell transfection or transduction; (3) permit the sustained or delayed release; (4) alter the biodistribution (e.g., target the viral particle to specific tissues or cell types); (5) increase the translation of encoded protein in vivo; (6) alter the release profile of encoded protein in vivo and/or (7) allow for regulatable expression of the payload.

[0251] Formulations of the present disclosure can include, without limitation, saline, lipidoids, liposomes, lipid nanoparticles, polymers, lipoplexes, core-shell nanoparticles, peptides, proteins, cells transfected with viral vectors (e.g., for transplantation into a subject), nanoparticle mimics and combinations thereof. Further, the viral vectors of the present disclosure may be formulated using self-assembled nucleic acid nanoparticles.

[0252] Formulations of the AAV pharmaceutical compositions described herein may be prepared by any method known or hereafter developed in the art of pharmacology. In general, such preparatory methods include the step of bringing the active ingredient into association with an excipient and/or one or more other accessory ingredients, and then, if necessary and/or desirable, dividing, shaping and/or packaging the product into a desired single- or multi-dose unit.

[0253] A pharmaceutical composition in accordance with the present disclosure may be prepared, packaged, and/or sold in bulk, as a single unit dose, and/or as a plurality of single unit doses. As used herein, a “unit dose” refers to a discrete amount of the pharmaceutical composition comprising a predetermined amount of the active ingredient. The amount of the active ingredient is generally equal to the dosage of the active ingredient which would be administered to a subject and/or a convenient fraction of such a dosage such as, for example, one-half or one-third of such a dosage.

[0254] Relative amounts of the active ingredient (e.g. AAV), the pharmaceutically acceptable excipient, and/or any additional ingredients in a pharmaceutical composition in accordance with the present disclosure may vary, depending upon the identity, size, and/or condition of the subject being treated and further depending upon the route by which the composition is to be administered. For example, the composition may comprise between 0.1% and 99% (w/w) of the active ingredient. By way of example, the composition may comprise between 0.1% and 100%, e.g., between 0.5 and 50%, between 1-30%, between 5-80%, at least 80% (w/w) active ingredient.

[0255] In one embodiment, the pharmaceutical composition comprises a recombinant adeno-associated virus (AAV) vector comprising an AAV capsid and an AAV vector genome. The AAV vector genome may comprise at least one AADC polynucleotide described herein, such as, but not limited to, SEQ ID NOs 6, 7, 8, 9, 17, 18, 19, 20, 21, 22, and 23 or variants having at least 95% identity thereto. The recombinant AAV vectors in the pharmaceutical composition may have at least 70% which contain an AAV vector genome.

[0256] In some embodiments, the AAV formulations described herein may contain at least one payload molecule, e.g., an AADC polynucleotide. As a non-limiting example, the formulations may contain 1, 2, 3, 4 or 5 AADC polynucleotide payload molecules. In one embodiment the formulation may contain a payload encoding proteins selected from categories such as, but not limited to, human proteins, veterinary proteins, bacterial proteins, biological proteins, antibodies, immunogenic proteins, therapeutic peptides and proteins, secreted proteins, plasma membrane proteins, cytoplasmic and cytoskeletal proteins, intracellular membrane bound proteins, nuclear proteins, proteins associated with human disease and/or proteins associated with non-human diseases. In one embodiment, the formulation contains at least three AAV payload encoding proteins.

[0257] The formulations can include one or more excipients, each in an amount that together increases the stability of the AAV particle, increases cell transfection or transduction by the viral particle, increases the expression of viral polynucleotide encoded protein, and/or alters the release profile of AAV polynucleotide encoded proteins. In some embodiments, a pharmaceutically acceptable excipient may be at least 95%, at least 96%, at least 97%, at least 98%, at least 99%, or 100% pure. In some embodiments, an excipient is approved for use for humans and for veterinary use. In some embodiments, an excipient may be approved by United States Food and Drug Administration. In some embodiments, an excipient may be of pharmaceutical grade. In some embodiments, an excipient may meet the standards of the United States Pharmacopoeia (USP), the European Pharmacopoeia (EP), the British Pharmacopoeia, and/or the International Pharmacopoeia.

[0258] Excipients, as used herein, include, but are not limited to, any and all solvents, dispersion media, diluents, or other liquid vehicles, dispersion or suspension aids, surface active agents, isotonic agents, thickening or emulsifying agents, preservatives, and the like, as suited to the particular dosage form desired. Various excipients for formulating pharmaceutical compositions and techniques for preparing the composition are known in the art (see Remington: The Science and Practice of Pharmacy, 21^{st} Edition, A. R. Gennaro, Lippincott, Williams & Wilkins, Baltimore, Md., 2006; incorporated herein by reference in its entirety). The use of a conventional excipient medium may be contemplated within the scope of the present disclosure, except insofar as any conventional excipient medium may be incompatible with a substance or its derivatives, such as by producing any undesirable biological effect or otherwise interacting in a deleterious manner with any other component(s) of the pharmaceutical composition. Exemplary diluents include, but are not limited to, calcium carbonate, sodium carbonate, calcium phosphate, dicalcium phosphate, calcium sulfate, calcium hydrogen phosphate, sodium phosphate lactose, sucrose, cellulose, microcrystalline cellulose, kaolin, mannitol, sorbitol, inositol, sodium chloride, dry starch, cornstarch, powdered sugar, etc., and/or combinations thereof.

[0259] In one embodiment, the AADC polynucleotides may be formulated in a hydrogel prior to administration. Hydrogels have a degree of flexibility which is similar to natural tissue as a result of their significant water content.

[0260] In another embodiment, a hydrogel may be administered to a subject prior to the administration of an AADC polynucleotide formulation. As a non-limiting example, the site of administration of the hydrogel may be within 3 inches (e.g., within 2.9, 2.8, 2.7, 2.6, 2.5, 2.4, 2.3, 2.2, 2.1, 2.0, 1.9, 1.8, 1.7, 1.6, 1.5, 1.4, 1.3, 1.2, 1.1, 1.0, 0.9, 0.8, 0.7, 0.6, 0.5, 0.4, 0.3, 0.2, 0.1 or less than 0.1 inches) of the site of administration of the AADC polynucleotide formulation.

[0261] In one embodiment, the AADC polynucleotides may be administered in saline. As a non-limiting example, the formulation may be phosphate buffered saline (PBS) with 0.001% Pluronic acid (F-68). Additionally the formulation may be sterilized.

### Inactive Ingredients

[0262] In some embodiments, AADC polynucleotide formulations may comprise at least one excipient which is an inactive ingredient. As used herein, the term “inactive ingredient” refers to one or more inactive agents included in formulations. In some embodiments, all, none or some of the inactive ingredients which may be used in the formulations of the present disclosure may be approved by the US Food and Drug Administration (FDA).

[0263] Formulations of AAV particles and viral vectors carrying AADC polynucleotides disclosed herein may include cations or anions. In one embodiment, the formulations include metal cations such as, but not limited to, Zn2+, Ca2+, Cu2+, Mg+ and combinations thereof. As a non-limiting example, formulations may include polymers and AADC polynucleotides complexed with a metal cation (See e.g., U.S. Pat. Nos. 6,265,389 and 6,555,525, each of which is herein incorporated by reference in its entirety).

### Administration

[0264] The AAV particles and viral vectors comprising AADC polynucleotides of the present disclosure may be administered by any route which results in a therapeutically effective outcome. These include, but are not limited to enteral (into the intestine), gastroenteral, epidural (into the dura matter), intracerebral (into the cerebrum), intracerebroventricular (into the cerebral ventricles, a.k.a. “intraventricular”), intradural (within or beneath the dura), intrastriatal (within the striatum, caudate nucleus and/or putamen), peridural, epicutaneous (application onto the skin), subcutaneous (under the skin), intradermal (into the skin itself), transdermal (diffusion through the intact skin for systemic distribution), transmucosal (diffusion through a mucous membrane), transvaginal, insufflation (snorting), sublingual, sublabial, enema, eye drops (onto the conjunctiva), in ear drops, auricular (in or by way of the ear), buccal (directed toward the cheek), conjunctival, cutaneous, dental (to a tooth or teeth), nasal administration (through the nose), intravenous (into a vein), intravenous bolus, intravenous drip, intraarterial (into an artery), intramuscular (into a muscle), intracardiac (into the heart), intraosseous infusion (into the bone marrow), intraperitoneal, (infusion or injection into the peritoneum), intravesical infusion, intravitreal, (through the eye), intracavernous injection (into a pathologic cavity) intracavitary (into the base of the penis), intravaginal administration, intrauterine, extra-amniotic administration, electro-osmosis, endocervical, endosinusial, endotracheal, extracorporeal, hemodialysis, infiltration, interstitial, intra-abdominal, intra-amniotic, intra-articular, intrabiliary, intrabronchial, intrabursal, intracartilaginous (within a cartilage), intracaudal (within the cauda equine), intracisternal (within the cisterna magna cerebellomedularis), intracorneal (within the cornea), dental intracornal, intracoronary (within the coronary arteries), intracorporus cavernosum (within the dilatable spaces of the corporus cavernosa of the penis), intradiscal (within a disc), intraductal (within a duct of a gland), intraduodenal (within the duodenum), intraepidermal (to the epidermis), intraesophageal (to the esophagus), intragastric (within the stomach), intragingival (within the gingivae), intraileal (within the distal portion of the small intestine), intralesional (within or introduced directly to a localized lesion), intraluminal (within a lumen of a tube), intralymphatic (within the lymph), intramedullary (within the marrow cavity of a bone), intrameningeal (within the meninges), intraocular (within the eye), intraovarian (within the ovary), intrapericardial (within the pericardium), intrapleural (within the pleura), intraprostatic (within the prostate gland), intrapulmonary (within the lungs or its bronchi), intrasinal (within the nasal or periorbital sinuses), intraspinal (within the vertebral column), intrasynovial (within the synovial cavity of a joint), intratendinous (within a tendon), intratesticular (within the testicle), intrathecal (within the cerebrospinal fluid at any level of the cerebrospinal axis), intrathoracic (within the thorax), intratubular (within the tubules of an organ), intratumor (within a tumor), intratympanic (within the aurus media), intravascular (within a vessel or vessels), intraventricular (within a ventricle), iontophoresis (by means of electric current where ions of soluble salts migrate into the tissues of the body), irrigation (to bathe or flush open wounds or body cavities), laryngeal (directly upon the larynx), nasogastric (through the nose and into the stomach), occlusive dressing technique (topical route administration which is then covered by a dressing which occludes the area), ophthalmic (to the external eye), oral (by way of the mouth), oropharyngeal (directly to the mouth and pharynx), parenteral, percutaneous, periarticular, perineural, periodontal, rectal, respiratory (within the respiratory tract by inhaling orally or nasally for local or systemic effect), retrobulbar (behind the pons or behind the eyeball), soft tissue, subarachnoid, subconjunctival, submucosal, topical, transplacental (through or across the placenta), transtracheal (through the wall of the trachea), transtympanic (across or through the tympanic cavity), ureteral (to the ureter), urethral (to the urethra), vaginal, caudal block, diagnostic, nerve block, biliary perfusion, cardiac perfusion, photopheresis or spinal. In specific embodiments, compositions may be administered in a way which allows them cross the blood-brain barrier (BBB), vascular barrier, or other epithelial barrier. In some embodiments, compositions may be administered to the substantia nigra, in particular, to the substantia nigra pars compacta (SNpc), and to the ventral tegmental area (VTA). In one embodiment, a formulation for a route of administration may include at least one inactive ingredient.

[0265] In one embodiment, the viral vectors comprising AADC polynucleotides of the present disclosure may be administered to the ventricles.

[0266] In one embodiment, the viral vectors comprising AADC polynucleotides of the present disclosure may be administered to the ventricles by intracerebroventricular delivery.

[0267] In one embodiment, the viral vectors comprising AADC polynucleotides of the present disclosure may be administered systemically.

[0268] In one embodiment, the viral vectors comprising AADC polynucleotides of the present disclosure may be administered systemically by intraperitoneal injection.

[0269] In one embodiment, the viral vectors comprising AADC polynucleotides of the present disclosure may be administered systemically by intravascular injection.

[0270] In one embodiment, the viral vectors comprising AADC polynucleotides of the present disclosure may be administered to the putamen.

[0271] In one embodiment, the viral vectors comprising AADC polynucleotides of the present disclosure may be administered to the right putamen and/or the left putamen. The administration may be at one or more sites in the putamen such as, but not limited to, 2 sites, 3 sites, 4 sites or more than 4 sites. As a non-limiting example, the viral vectors comprising AADC polynucleotides of the present disclosure are delivered to 2 sites in the left putamen and 2 sites in the right putamen.

[0272] In one embodiment, the administration of the formulation of the viral vectors comprising the AADC polynucleotides of the present disclosure to a subject provides coverage of the putamen of a subject (e.g., the left and/or right putamen). In one aspect, the administration of the viral vectors comprising the AADC polynucleotides may provide at least 8%, 9%, 10%, 13%, 14%15%, 19%, 20%, 21%, 22%, 23%, 24%, 25%, 26%, 27%, 28%, 29%, 30%, 31%, 32%, 33%, 34%, 35%, 36%, 37%, 38%, 39%, 40%, 41%, 42%, 43%, 44%, 45%, 46%, 47%, 48%, 49%, 50%, 51%, 52%, 53%, 54%, 55%, 60%, 65%, 70%, 75%, 80%, 85%, 90%, 95% or more than 95% to the left and/or right putamen of a subject. As a non-limiting example, the coverage is at least 20%. As a non-limiting example, the coverage is at least 40%. In another aspect, the administration of the viral vectors comprising the AADC polynucleotides may provide at least 8%, 9%, 10%, 13%, 14%, 15%, 19%, 20%, 21%, 22%, 23%, 24%, 25%, 26%, 27%, 28%, 29%, 30%, 31%, 32%, 33%, 34%, 35%, 36%, 37%, 38%, 39%, 40%, 41%, 42%, 43%, 44%, 45%, 46%, 47%, 48%, 49%, 50%, 51%, 52%, 53%, 54%, 55%, 60%, 65%, 70%, 75%, 80%, 85%, 90%, 95% or more than 95% coverage of the surface area of the left and/or right putamen of a subject. As a non-limiting example, the total coverage is at least 20%. As a non-limiting example, the total coverage is at least 40%. In yet another aspect, the administration of the viral vectors comprising the AADC polynucleotides may provide 10-40%, 20-40%, 20-30%, 20-35%, 20-50%, 30-40%, 35-40%, 30-60%, 40-70%, 50-80% or 60-90% coverage to the left and/or right putamen of a subject or to the total surface area of the left and/or right putamen of a subject.

[0273] In one embodiment, the administration of the formulation of the viral vectors comprising the AADC polynucleotides of the present disclosure to a subject provides coverage of the posterior putamen of a subject (e.g., the left and/or right posterior putamen). In one aspect, the administration of the viral vectors comprising the AADC polynucleotides may provide at least 10%, 15%, 20%, 21%, 22%, 23%, 24%, 25%, 26%, 27%, 28%, 29%, 30%, 31%, 32%, 33%, 34%, 35%, 36%, 37%, 38%, 39%, 40%, 41%, 42%, 43%, 44%, 45%, 46%, 47%, 48%, 49%, 50%, 51%, 52%, 53%, 54%, 55%, 60%, 65%, 70%, 75%, 80%, 85%, 90%, 95% or more than 95% to the left and/or right posterior putamen of a subject. As a non-limiting example, the coverage is at least 20%. As a non-limiting example, the coverage is at least 40%. In another aspect, the administration of the viral vectors comprising the AADC polynucleotides may provide at least 10%, 15%, 20%, 21%, 22%, 23%, 24%, 25%, 26%, 27%, 28%, 29%, 30%, 31%, 32%, 33%, 34%, 35%, 36%, 37%, 38%, 39%, 40%, 41%, 42%, 43%, 44%, 45%, 46%, 47%, 48%, 49%, 50%, 51%, 52%, 53%, 54%, 55%, 60%, 65%, 70%, 75%, 80%, 85%, 90%, 95% or more than 95% coverage of the surface area of the left and/or right posterior putamen of a subject. As a non-limiting example, the total coverage is at least 20%. As a non-limiting example, the total coverage is at least 40%. In yet another aspect, the administration of the viral vectors comprising the AADC polynucleotides may provide 10-40%, 20-50%, 30-60%, 40-70%, 50-80% or 60-90% coverage to the left and/or right posterior putamen of a subject or to the total surface area of the left and/or right putamen of a subject.

[0274] In one embodiment, a subject may be administered the viral-vectors comprising AADC polynucleotides of the present disclosure safely delivered to substantia nigra pars compacta (SNpc) and ventral tegmental area (VTA) via bilateral infusions, or alternatively, intrastriatally (into the caudate nucleus and putamen), or into the subthalamic nucleus (STN).

[0275] In one embodiment, the AADC polynucleotides described herein may be administered bilaterally to the putamen.

[0276] In one embodiment, the AADC polynucleotides described herein may be administered bilaterally to the putamen by parenchymal delivery.

[0277] In one embodiment, the AADC polynucleotides described herein may be administered using acute bilateral placement of catheters into each putamen. The placement may use magnetic resonance image (MRD-guided stereotactic neurosurgical techniques known in the art or described herein. Additionally, a contrast agent such as, but not limited to a gadolinium based contrast agent (e.g., PROHANCE®) may be used in the formulation to monitor and confirm the distribution of the formulation.

[0278] In one embodiment, a subject may be administered the viral vectors comprising AADC polynucleotides of the present disclosure in a bilateral stereotactic CED-assisted step infusion into the putamen (e.g., the post commissural putamen).

[0279] The AAV particle of the present disclosure may be administered or delivered to a subject suffering from AADC deficiency by any of the methods described in United States Publication No. US20120220648; Clinical Trial NCT01395641; Hwu, W. L., et al., 2012 Gene therapy for aromatic L-amino acid decarboxylase deficiency. Sci. Transl. Med. Vol. 4, 134ra61; Lee, N.C., et al., 2013 Treatment of congenital neurotransmitter deficiencies by intracerebral ventricular injection of an adeno-associated virus serotype 9 vector. Hum. Gen. Ther. 25:189-198; and Lee, N.C., et al., 2015 Benefits of neuronal preferential systemic gene therapy for neurotransmitter deficiency. Mol. Ther. Vol. 23(10), 1572-1581, the contents of each of which are herein incorporated by reference in their entirety.

[0280] In one embodiment, the AAV particle of the present disclosure is delivered by intraperitoneal injection (systemic delivery) as described in Lee, N.C., et al., 2015 Benefits of neuronal preferential systemic gene therapy for neurotransmitter deficiency. Mol. Ther. Vol. 23(10), 1572-1581, the contents of which are herein incorporated by reference in their entirety.

[0281] In one embodiment, delivery of viral vector pharmaceutical compositions in accordance with the present disclosure to cells of the central nervous system (e.g., parenchyma) comprises a rate of delivery defined by VG/hour=mL/hour*VG/mL, wherein VG is viral genomes, VG/mL is composition concentration, and mL/hour is rate of prolonged infusion.

[0282] In one embodiment, delivery of viral vector pharmaceutical compositions in accordance with the present disclosure to cells of the central nervous system (e.g., parenchyma) comprises infusion of up to 1 mL. In one embodiment, delivery of viral vector pharmaceutical compositions in accordance with the present disclosure to cells of the central nervous system (e.g., parenchyma) may comprise infusion of 0.0001, 0.0002, 0.001, 0.002, 0.003, 0.004, 0.005, 0.008, 0.010, 0.015, 0.020, 0.025, 0.030, 0.040, 0.050, 0.060, 0.070, 0.080, 0.090, 0.1, 0.2, 0.3, 0.4, 0.5, 0.6, 0.7, 0.8, or 0.9 mL. In a non-limiting example the AAV particles of the present disclosure are infused in a volume of 80 μL. In another non-limiting example the AAV particles of the present disclosure are infused in a volume of 20 μL. In a non-limiting example, the AAV particles of the present disclosure are infused in a volume of 2 μL.

[0283] In one embodiment, delivery of viral vector pharmaceutical compositions in accordance with the present disclosure to cells of the central nervous system (e.g., parenchyma) comprises infusion of between about 1 mL to about 120 mL. In one embodiment, delivery of viral vector pharmaceutical compositions in accordance with the present disclosure to cells of the central nervous system (e.g., parenchyma) may comprise an infusion of 0.1, 1, 1.1, 1.2, 1.3, 1.4, 1.5, 1.6, 1.7, 1.8, 1.9, 2, 3, 4, 5, 6, 7, 8, 9, 10, 11, 12, 13, 14, 15, 16, 17, 18, 19, 20, 21, 22, 23, 24, 25, 26, 27, 28, 29, 30, 31, 32, 33, 34, 35, 36, 37, 38, 39, 40, 41, 42, 43, 44, 45, 46, 47, 48, 49, 50, 51, 52, 53, 54, 55, 56, 57, 58, 59, 60, 61, 62, 63, 64, 65, 66, 67, 68, 69, 70, 71, 72, 73, 74, 75, 76, 77, 78, 79, 80, 81, 82, 83, 84, 85, 86, 87, 88, 89, 90, 91, 92, 93, 94, 95, 96, 97, 98, 99, 100, 101, 102, 103, 104, 105, 106, 107, 108, 109, 110, 111, 112, 113, 114, 115, 116, 117, 118, 119, or 120 mL. In one embodiment, delivery of AAV particles to cells of the central nervous system (e.g., parenchyma) comprises infusion of at least 3 mL. In one embodiment, delivery of AAV particles to cells of the central nervous system (e.g., parenchyma) consists of infusion of 3 mL. In one embodiment, delivery of AAV particles to cells of the central nervous system (e.g., parenchyma) comprises infusion of at least 10 mL. In one embodiment, delivery of AAV particles to cells of the central nervous system (e.g., parenchyma) consists of infusion of 10 mL.

[0284] In one embodiment, the volume of the viral vector pharmaceutical composition delivered to the cells of the central nervous system (e.g., parenchyma) of a subject is 2 ul, 20 ul, 50 ul, 80 ul, 100 ul, 200 ul, 300 ul, 400 ul, 500 ul, 600 ul, 700 ul, 800 ul, 900 ul, 1000 ul, 1100 ul, 1200 ul, 1300 ul, 1400 ul, 1500 ul, 1600 ul, 1700 ul, 1800 ul, 1900 ul, 2000 ul or more than 2000 ul. In a non-limiting example the AAV particles of the present disclosure are infused in a volume of 80 ul. In another non-limiting example the AAV particles of the present disclosure are infused in a volume of 20 ul. In a non-limiting example, the AAV particles of the present disclosure are infused in a volume of 2 ul.

[0285] In one embodiment, the volume of the viral vector pharmaceutical composition delivered to a region in both hemispheres of a subject brain is 2 ul, 20 ul, 50 ul, 80 ul, 100 ul, 200 ul, 300 ul, 400 ul, 500 ul, 600 ul, 700 ul, 800 ul, 900 ul, 1000 ul, 1100 ul, 1200 ul, 1300 ul, 1400 ul, 1500 ul, 1600 ul, 1700 ul, 1800 ul, 1900 ul, 2000 ul or more than 2000 ul. As a non-limiting example, the volume delivered to a region in both hemispheres is 200 ul. As another non-limiting example, the volume delivered to a region in both hemispheres is 900 ul. As yet another non-limiting example, the volume delivered to a region in both hemispheres is 1800 ul.

[0286] In one embodiment, the volume of the viral vector pharmaceutical composition delivered to the putamen in both hemispheres of a subject brain is 2 ul, 20 ul, 50 ul, 80 ul, 100 ul, 200 ul, 300 ul, 400 ul, 450 ul, 500 ul, 600 ul, 700 ul, 800 ul, 900 ul, 1000 ul, 1100 ul, 1200 ul, 1300 ul, 1400 ul, 1500 ul, 1600 ul, 1700 ul, 1800 ul, 1900 ul, 2000 ul or more than 2000 ul. As a non-limiting example, the volume delivered to the putamen in both hemispheres is 100 ul. As another non-limiting example, the volume delivered to the putamen in both hemispheres is 200 ul. As a non-limiting example, the volume delivered to the putamen in both hemispheres is 300 ul. As another non-limiting example, the volume delivered to the putamen in both hemispheres is 450 ul. As another non-limiting example, the volume delivered to the putamen in both hemispheres is 900 ul. As yet another non-limiting example, the volume delivered to the putamen in both hemispheres is 1800 ul.

[0287] In one embodiment, the total volume delivered to a subject may be split between one or more administration sites e.g., 1, 2, 3, 4, 5 or more than 5 sites. As a non-limiting example, the total volume is split between administration to the left and right putamen. As another non-limiting example, the total volume is split between two sites of administration to each of the left and right putamen.

[0288] In one embodiment, the viral vector pharmaceutical composition is administered using a fenestrated needle. Non-limiting examples of fenestrated needles are described in U.S. Pat. Nos. 8,333,734, 7,135,010, 7,575,572, 7,699,852, 4,411,657, 6,890,319, 6,613,026, 6,726,659, 6,565,572, 6,520,949, 6,382,212, 5,848,996, 5,759,179, 5,674,267, 5,588,960, 5,484,401, 5,199,441, 5,012,818, 4,474,569, 3,766,907, 3,552,394, the contents of each of which are herein incorporated by reference in their entirety.

[0289] In one embodiment, a composition comprises AADC polynucleotides described herein and the AADC polynucleotides are components of an AAV viral genome packaged in an AAV viral particle. The percent (%) ratio of AAV viral particles comprising the AADC polynucleotide (also referred to herein and AADC particles) to the AAV viral particles without the AADC polynucleotide (also referred to herein as empty capsids) in the composition may be 0:100, 1:99, 0:90, 15:85, 25:75, 30:70, 50:50, 70:30, 85:15, 90:10, 99:1 or 100:0. As a non-limiting example, the percent ratio of AADC particles to empty capsids is 50:50. As another non-limiting example, the percent ratio of AADC particles to empty capsids is 70:30. As another non-limiting example, the percent ratio of AADC particles to empty capsids is 85:15. As another non-limiting example, the percent ratio of AADC particles to empty capsids is 100:0.

[0290] In one embodiment, the composition described herein comprises at least 1, 5, 10, 15, 20, 25, 30, 35, 40, 45, 50, 51, 52, 53, 54, 55, 60, 65, 70, 75, 80, 81, 82, 83, 84, 85, 86, 87, 88, 89, 90, 91, 92, 93, 94, 95, 96, 97, 98, 99 or greater than 99% AADC particles. As a non-limiting example, the composition comprises at least 50% AADC particles. As another non-limiting example, the composition comprises at least 52% AADC particles. As another non-limiting example, the composition comprises at least 58% AADC particles. As another non-limiting example, the composition comprises at least 70% AADC particles. As another non-limiting example, the composition comprises at least 83% AADC particles. As another non-limiting example, the composition comprises at least 85% AADC particles. As another non-limiting example, the composition comprises at least 99% AADC particles. As another non-limiting example, the composition comprises 100% AADC particles.

[0291] In one embodiment, the composition described herein comprises 1-10%, 10-20%, 30-40%, 50-60%, 50-70%, 50-80%, 50-90%, 50-99%, 50-100%, 60-70%, 60-80%, 60-90%, 60-99%, 60-100%, 70-80%, 70-90%, 70-99%, 70-100%, 80-85%, 80-90%, 80-95%, 80-99%, 80-100%, 90-95%, 90-99%, or 90-100% AADC particles. As a non-limiting example, the composition described herein comprises 50-100% AADC particles. As another non-limiting example, the composition described herein comprises 50-60% AADC particles. As another non-limiting example, the composition described herein comprises 80-99% AADC particles. As another non-limiting example, the composition described herein comprises 80-90% AADC particles. As a non-limiting example, the composition described herein comprises 80-95% AADC particles. As a non-limiting example, the composition described herein comprises 80-85% AADC particles.

[0292] In one embodiment, the composition described herein comprises less than 1, 5, 10, 15, 20, 25, 30, 35, 40, 45, 50, 51, 52, 53, 54, 55, 60, 65, 70, 75, 80, 81, 82, 83, 84, 85, 86, 87, 88, 89, 90, 91, 92, 93, 94, 95, 96, 97, 98, 99 or 100% empty particles. As a non-limiting example, the composition comprises less than 50% empty particles. As a non-limiting example, the composition comprises less than 45% empty particles. As a non-limiting example, the composition comprises less than 40% empty particles. As a non-limiting example, the composition comprises less than 35% empty particles. As a non-limiting example, the composition comprises less than 30% empty particles. As a non-limiting example, the composition comprises less than 25% empty particles. As a non-limiting example, the composition comprises less than 20% empty particles. As a non-limiting example, the composition comprises less than 15% empty particles. As a non-limiting example, the composition comprises less than 10% empty particles. As a non-limiting example, the composition comprises less than 5% empty particles. As a non-limiting example, the composition comprises less than 1% empty particles.

[0293] In one embodiment, the composition described herein comprises 1-10%, 10-20%, 30-40%, 50-60%, 50-70%, 50-80%, 50-90%, 50-99%, 50-100%, 60-70%, 60-80%, 60-90%, 60-99%, 60-100%, 70-80%, 70-90%, 70-99%, 70-100%, 80-85%, 80-90%, 80-95%, 80-99%, 80-100%, 90-95%, 90-99%, or 90-100% empty particles. As a non-limiting example, the composition described herein comprises 30-40% empty particles. As another non-limiting example, the composition described herein comprises 30-50% AADC particles. As another non-limiting example, the composition described herein comprises 30-60% empty particles. As another non-limiting example, the composition described herein comprises 30-70% empty particles. As a non-limiting example, the composition described herein comprises 30-80% empty particles. As a non-limiting example, the composition described herein comprises 30-90% empty particles.

### Dosing

[0294] The present disclosure provides methods comprising administering AAV particles or viral vectors and their payload or complexes in accordance with the disclosure to a subject in need thereof. AAV particle or viral vector pharmaceutical, imaging, diagnostic, or prophylactic compositions may be administered to a subject using any amount and any route of administration effective for preventing, treating, diagnosing, or imaging a disease, disorder, and/or condition (e.g., a disease, disorder, and/or condition relating to working memory deficits). The exact amount required will vary from subject to subject, depending on the species, age, and general condition of the subject, the severity of the disease, the particular composition, its mode of administration, its mode of activity, and the like. Compositions in accordance with the disclosure are typically formulated in unit dosage form for ease of administration and uniformity of dosage. It will be understood, however, that the total daily usage of the compositions of the present disclosure may be decided by the attending physician within the scope of sound medical judgment. The specific therapeutically effective, prophylactically effective, or appropriate imaging dose level for any particular patient will depend upon a variety of factors including the disorder being treated and the severity of the disorder; the activity of the specific payload employed; the specific composition employed; the age, body weight, general health, sex and diet of the patient; the time of administration, route of administration, and rate of excretion of the specific payload employed; the duration of the treatment; drugs used in combination or coincidental with the specific payload employed; and like factors well known in the medical arts.

[0295] In certain embodiments, AAV particle or viral vector pharmaceutical compositions in accordance with the present disclosure may be administered at dosage levels sufficient to deliver from about 0.0001 mg/kg to about 100 mg/kg, from about 0.001 mg/kg to about 0.05 mg/kg, from about 0.005 mg/kg to about 0.05 mg/kg, from about 0.001 mg/kg to about 0.005 mg/kg, from about 0.05 mg/kg to about 0.5 mg/kg, from about 0.01 mg/kg to about 50 mg/kg, from about 0.1 mg/kg to about 40 mg/kg, from about 0.5 mg/kg to about 30 mg/kg, from about 0.01 mg/kg to about 10 mg/kg, from about 0.1 mg/kg to about 10 mg/kg, or from about 1 mg/kg to about 25 mg/kg, of subject body weight per day, one or more times a day, to obtain the desired therapeutic, diagnostic, prophylactic, or imaging effect. It will be understood that the above dosing concentrations may be converted to vg or viral genomes per kg or into total viral genomes administered by one of skill in the art.

[0296] In certain embodiments, AAV particle or viral vector pharmaceutical compositions in accordance with the present disclosure may be administered at about 10 to about 600 μl/site, 50 to about 500 μl/site, 100 to about 400 μl/site, 120 to about 300 μl/site, 140 to about 200 μl/site, about 160 μl/site.

[0297] The desired dosage may be delivered three times in a single day, two times in a single day, once in a since day or in a period of 24 hours the dosage may be delivered once, twice, three times or more than three times. In certain embodiments, the desired dosage may be delivered using multiple administrations (e.g., two, three, four, five, six, seven, eight, nine, ten, eleven, twelve, thirteen, fourteen, or more administrations). When multiple administrations are employed, split dosing regimens such as those described herein may be used. As used herein, a “split dose” is the division of single unit dose or total daily dose into two or more doses, e.g., two or more administrations of the single unit dose. As used herein, a “single unit dose” is a dose of any therapeutic administered in one dose/at one time/single route/single point of contact, i.e., single administration event. As used herein, a “total daily dose” is an amount given or prescribed in 24 hr period. It may be administered as a single unit dose. In one embodiment, the AAV particles or viral vectors of the present disclosure are administered to a subject in split doses, and may be formulated in buffer only or in a formulation described herein.

[0298] A pharmaceutical composition described herein can be formulated into a dosage form described herein, such as a topical, intranasal, pulmonary, intratracheal, or injectable (e.g., intravenous, intraocular, intravitreal, intramuscular, intracardiac, intraperitoneal, and/or subcutaneous).

[0299] In one embodiment, delivery of viral vector pharmaceutical compositions in accordance with the present disclosure to cells of the central nervous system (e.g., parenchyma) may comprise a total concentration between about 1×10⁶ VG/mL and about 1×10¹⁶ VG/mL. In some embodiments, delivery may comprise a composition concentration of about 1×10⁶, 2×10⁶, 3×10⁶, 4×10⁶, 5×10⁶, 6×10⁶, 7×10⁶, 8×10⁶, 9×10⁶, 1×10⁷, 2×10⁷, 3×10⁷, 4×10⁷, 5×10⁷, 6×10⁷, 7×10⁷, 8×10⁷, 9×10⁷, 1×10⁸, 2×10⁸, 3×10⁸, 4×10⁸, 5×10⁸, 6×10⁸, 7×10⁸, 8×10⁸, 9×10⁸, 1×10⁹, 2×10⁹ 3×10⁹ 4×10⁹ 5×10⁹ 6×10⁹ 7×10⁹ 8×10⁹ 9×10⁹, 1×10¹⁰, 2×10¹⁰, 3×10¹⁰, 4×10¹⁰, 5×10¹⁰, 6×10¹⁰, 7×10¹⁰, 8×10¹⁰, 9×10¹⁰, 1×10¹¹, 1.6×10¹¹, 1.8×10¹¹, 2×10¹¹, 3×10¹¹, 4×10¹¹, 5×10¹¹, 5.5×10¹¹, 6×10¹¹, 7×10¹¹, 8×10¹¹, 9×10¹¹, 0.8×10¹², 0.83×10¹², 1×10¹², 1.1×10¹², 1.2×10¹², 1.3×10¹², 1.4×10¹², 1.5×10¹², 1.6×10¹², 1.7×10¹², 1.8×10¹², 1.9×10¹², 2×10¹², 2.1×10¹², 2.2×10¹², 2.3×10¹², 2.4×10¹², 2.5×10¹², 2.6×10¹², 2.7×10¹², 2.8×10¹², 2.9×10¹², 3×10¹², 3.1×10¹², 3.2×10¹², 3.3×10¹², 3.4×10¹², 3.5×10¹², 3.6×10¹², 3.7×10¹², 3.8×10¹², 3.9×10¹², 4×10¹², 4.1×10¹², 4.2×10¹², 4.3×10¹², 4.4×10¹², 4.5×10¹², 4.6×10¹², 4.7×10¹², 4.8×10¹², 4.9×10¹², 5×10¹², 6×10¹², 7×10¹², 8×10¹², 9×10¹², 1×10¹³, 2×10¹³, 2.3×10¹³, 3×10¹³, 4×10¹³, 5×10¹³, 6×10¹³, 7×10¹³, 8×10¹³, 9×10¹³, 1×10¹⁴, 1.9×10¹⁴, 2×10¹⁴, 3×10¹⁴, 4×10¹⁴, 5×10¹⁴, 6×10¹⁴, 7×10¹⁴, 8×10¹⁴, 9×10¹⁴, 1×10¹⁵, 2×10¹⁵, 3×10¹⁵, 4×10¹⁵, 5×10¹⁵, 6×10¹⁵, 7×10¹⁵, 8×10¹⁵, 9×10¹⁵, or 1×10¹⁶ VG/mL. In one embodiment, the concentration of the viral vector in the composition is 1×10¹³ VG/mL. In one embodiment, the concentration of the viral vector in the composition is 1.1×10¹² VG/mL. In one embodiment, the concentration of the viral vector in the composition is 3.7×10¹² VG/mL. In one embodiment, the concentration of the viral vector in the composition is 8×10¹² VG/mL. In one embodiment, the concentration of the viral vector in the composition is 2.6×10¹² VG/mL. In one embodiment, the concentration of the viral vector in the composition is 4.9×10¹² VG/mL. In one embodiment, the concentration of the viral vector in the composition is 0.8×10¹² VG/mL. In one embodiment, the concentration of the viral vector in the composition is 0.83×10¹² VG/mL. In one embodiment, the concentration of the viral vector in the composition is the maximum final dose which can be contained in a vial. In one embodiment, the concentration of the viral vector in the composition is 1.6×10¹¹ VG/mL. In one embodiment, the concentration of the viral vector in the composition is 5×10¹¹ VG/mL. In one embodiment, the concentration of the viral vector in the composition is 2.3×10¹³ VG/mL. In one embodiment, the concentration of the viral vector in the composition is 1.9×10¹⁴ VG/mL.

[0300] In one embodiment, delivery of viral vector pharmaceutical compositions in accordance with the present disclosure to cells of the central nervous system (e.g., parenchyma) may comprise a total concentration per subject between about 1×10⁶ VG and about 1×10¹⁶ VG. In some embodiments, delivery may comprise a composition concentration of about 1×10⁶, 2×10⁶, 3×10⁶, 4×10⁶, 5×10⁶, 6×10⁶, 7×10⁶, 8×10⁶, 9×10⁶, 1×10⁷, 2×10⁷, 3×10⁷, 4×10⁷, 5×10⁷, 6×10⁷, 7×10⁷, 8×10⁷, 9×10⁷, 1×10⁸, 2×10⁸, 3×10⁸, 4×10⁸, 5×10⁸, 6×10⁸, 7×10⁸, 8×10⁸, 9×10⁸, 1×10⁹, 2×10⁹, 3×10⁹, 4×10⁹, 5×10⁹, 6×10⁹, 7×10⁹, 8×10⁹, 9×10⁹, 1×10¹⁰, 2×10¹⁰, 3×10¹⁰, 4×10¹⁰, 5×10¹⁰, 6×10¹⁰, 7×10¹⁰, 8×10¹⁰, 9×10¹⁰, 1×10¹¹, 1.6×10¹¹, 2×10¹¹, 2.1×10¹¹, 2.2×10¹¹, 2.3×10¹¹, 2.4×10¹¹, 2.5×10¹¹, 2.6×10¹¹, 2.7×10¹¹, 2.8×10¹¹, 2.9×10¹¹, 3×10¹¹, 4×10¹¹, 4.6×10¹¹, 5×10¹¹, 6×10¹¹, 7×10¹¹, 7.1×10¹¹, 7.2×10¹¹, 7.3×10¹¹, 7.4×10¹¹ 7.5×10¹¹, 7.6×10¹¹, 7.7×10¹¹, 7.8×10¹¹, 7.9×10¹¹, 8×10¹¹, 9×10¹¹, 1×10¹², 1.1×10¹², 1.2×10¹², 1.3×10¹², 1.4×10¹², 1.5×10¹², 1.6×10¹², 1.7×10¹², 1.8×10¹², 1.9×10¹², 2×10¹², 2.3×10¹², 3×10¹², 4×10¹², 4.1×10¹², 4.2×10¹², 4.3×10¹², 4.4×10¹², 4.5×10¹², 4.6×10¹², 4.7×10¹², 4.8×10¹², 4.9×10¹², 5×10¹², 6×10¹², 7×10¹², 8×10¹², 8.1×10¹², 8.2×10¹², 8.3×10¹², 8.4×10¹², 8.5×10¹², 8.6×10¹², 8.7×10¹², 8.8×10¹², 8.9×10¹², 9×10¹², 1×10¹³, 2×10¹³, 3×10¹³, 4×10¹³, 5×10¹³, 6×10¹³, 7×10¹³, 8×10¹³, 9×10¹³, 1×10¹⁴, 2×10¹⁴, 3×10¹⁴, 4×10¹⁴, 5×10¹⁴, 6×10¹⁴, 7×10¹⁴, 8×10¹⁴, 9×10¹⁴, 1×10¹⁵, 2×10¹⁵, 3×10¹⁵, 4×10¹⁵, 5×10¹⁵, 6×10¹⁵, 7×10¹⁵, 8×10¹⁵, 9×10¹⁵, or 1×10¹⁶ VG/subject. In one embodiment, the concentration of the viral vector in the composition is 2.3×10¹¹ VG/subject. In one embodiment, the concentration of the viral vector in the composition is 7.2×10¹¹ VG/subject. In one embodiment, the concentration of the viral vector in the composition is 7.5×10¹¹ VG/subject. In one embodiment, the concentration of the viral vector in the composition is 1.4×10¹² VG/subject. In one embodiment, the concentration of the viral vector in the composition is 4.8×10¹² VG/subject. In one embodiment, the concentration of the viral vector in the composition is 8.8×10¹² VG/subject. In one embodiment, the concentration of the viral vector in the composition is 2.3×10¹² VG/subject. In one embodiment, the concentration of the viral vector in the composition is 2×10¹⁰ VG/subject. In one embodiment, the concentration of the viral vector in the composition is 1.6×10¹¹ VG/subject. In one embodiment, the concentration of the viral vector in the composition is 4.6×10¹¹ VG/subject.

[0301] In one embodiment, AAV particles of the present disclosure may be delivered as an 80 μL, infusion of a composition with the concentration of 5×10¹¹ vg/ml, yielding a total of 1.6×10¹¹ VG delivered to each patient.

[0302] In one embodiment, AAV particles of the present disclosure may be delivered as an 80 μL, infusion of a composition with the concentration of 5×10¹¹ vg/ml, yielding a total of 1.6×10¹¹ VG delivered to each patient.

[0303] In one embodiment, AAV particles of the present disclosure may be delivered as an 80 μL, infusion of a composition with the concentration of 5×10¹¹ vg/ml at a rate of 3 ul per min, yielding a total of 1.6×10¹¹ VG delivered to each patient.

[0304] In one embodiment, AAV particles of the present disclosure may be delivered as an 80 μL, infusion of a composition with the concentration of 5×10¹¹ vg/ml at a rate of 3 ul per min, yielding a total of 1.6×10¹¹ VG delivered to each patient.

[0305] In one embodiment, the effectiveness of the dose, route of administration and/or volume of administration may be evaluated using various methods described herein such as, but not limited to, PET imaging, L-DOPA challenge test, UPDRS scores and patient diaries. As a non-limiting example, a subject may have decreased dyskinesia or periods of dyskinesia after administration of the AADC polynucleotide composition. As another non-limiting example, a subject may have a decrease in AADC Deficiency related symptoms including limited mobility and dyskinesia.

[0306] In one embodiment, a subject who may be administered a dose of the AADC polynucleotides described herein may have been previously treated with the same or similar therapeutic. In another embodiment, a subject may have been treated with a therapeutic which has been shown to reduce the symptoms of AADC Deficiency.

[0307] In one embodiment, a subject who may be administered a dose of the AADC polynucleotides described herein may have failed to derive adequate benefit from standard medical therapy. As a non-limiting example, the subject may not have responded to treatment. As another non-limiting example, a subject may have residual disability despite treatment.

[0308] In one embodiment, a subject who may be administered a dose of the AADC polynucleotides described herein may undergo testing to evaluate the levels of neurotransmitter analytes to determine the effectiveness of the dose. As a non-limiting example, CSF neurotransmitters, plasma AADC activity and/or urine VLA may be analyzed.

[0309] In one embodiment, a subject who may be administered a dose of the AADC polynucleotide described herein may be videotaped or recorded in order to monitor the progress of the subject during the course of treatment.

### Combinations

[0310] The AAV particles or viral vectors comprising the AADC polynucleotide may be used in combination with one or more other therapeutic, prophylactic, diagnostic, or imaging agents. By “in combination with,” it is not intended to imply that the agents must be administered at the same time and/or formulated for delivery together, although these methods of delivery are within the scope of the present disclosure. Compositions can be administered concurrently with, prior to, or subsequent to, one or more other desired therapeutics or medical procedures. In general, each agent will be administered at a dose and/or on a time schedule determined for that agent. In some embodiments, the present disclosure encompasses delivery of pharmaceutical, prophylactic, diagnostic, or imaging compositions in combination with agents that may improve their bioavailability, reduce and/or modify their metabolism, inhibit their excretion, and/or modify their distribution within the body.

### Delivery

[0311] In one embodiment, the viral vector comprising an AADC polynucleotide may be administered or delivered using the methods for the delivery of AAV virions described in European Patent Application No. EP1857552, the contents of which are herein incorporated by reference in their entirety.

[0312] In one embodiment, the viral vector comprising an AADC polynucleotide may be administered or delivered using the methods for delivering proteins using AAV vectors described in European Patent Application No. EP2678433, the contents of which are herein incorporated by reference in their entirety.

[0313] In one embodiment, the viral vector comprising an AADC polynucleotide may be administered or delivered using the methods for delivering DNA molecules using AAV vectors described in U.S. Pat. No. 5,858,351, the contents of which are herein incorporated by reference in their entirety.

[0314] In one embodiment, the viral vector comprising an AADC polynucleotide may be administered or delivered using the methods for delivering DNA to the bloodstream described in U.S. Pat. No. 6,211,163, the contents of which are herein incorporated by reference in their entirety.

[0315] In one embodiment, the viral vector comprising an AADC polynucleotide may be administered or delivered using the methods for delivering AAV virions described in U.S. Pat. No. 6,325,998, the contents of which are herein incorporated by reference in their entirety.

[0316] In one embodiment, the viral vector comprising an AADC polynucleotide may be administered or delivered using the methods for delivering a payload to the central nervous system described in U.S. Pat. No. 7,588,757, the contents of which are herein incorporated by reference in their entirety. In one embodiment, the AAV polynucleotide of the present disclosure may administered to a subject exhibiting symptoms associated with Parkinson's Disease. In one embodiment, the AAV polynucleotide of the present disclosure may be administered in a method of treating a subject with Parkinson's Disease.

[0317] In one embodiment, the viral vector comprising an AADC polynucleotide may be administered or delivered using the methods for delivering a payload described in U.S. Pat. No. 8,283,151, the contents of which are herein incorporated by reference in their entirety.

[0318] In one embodiment, the viral vector comprising an AADC polynucleotide may be administered or delivered using the methods for delivering a payload using a glutamic acid decarboxylase (GAD) delivery vector described in International Patent Publication No. WO2001089583, the contents of which are herein incorporated by reference in their entirety.

[0319] In one embodiment, the viral vector comprising an AADC polynucleotide may be administered or delivered using the methods for delivering a payload to neural cells described in International Patent Publication No. WO2012057363, the contents of which are herein incorporated by reference in their entirety.

[0320] The AAV particle of the present disclosure may be administered or delivered by any of the methods described in United States Publication No. US20120220648; Clinical trial NCT01395641; Hwu, W. L., et al., 2012 Gene therapy for aromatic L-amino acid decarboxylase deficiency. Sci. Transl. Med. Vol. 4, 134ra61; Lee, N.C., et al., 2013 Treatment of congenital neurotransmitter deficiencies by intracerebral ventricular injection of an adeno-associated virus serotype 9 vector. Hum. Gen. Ther. 25:189-198; and Lee, N.C., et al., 2015 Benefits of neuronal preferential systemic gene therapy for neurotransmitter deficiency. Mol. Ther. Vol. 23(10), 1572-1581, the contents of each of which are herein incorporated by reference in their entirety.

[0321] In one embodiment, the AADC polynucleotides of the present disclosure may be delivered in the same manner as described in Hwu, W. L., et al., 2012 Gene therapy for aromatic L-amino acid decarboxylase deficiency. Sci. Transl. Med. Vol. 4, 134ra61, the contents of which are herein incorporated by reference in their entirety, wherein two burr holes were created on either side of midline of the skull to target the putamen in each hemisphere, ensuring the burr holes are sufficiently distant from one another in the dorsolateral direction. A guide tube was first inserted, the stylet removed and a long needle stereotactically inserted for the infusion. During the infusion the needle was slowly withdrawn so as to allow vector distribution along the length of the needle tract (6-8 mm).

### Delivery to Cells

[0322] The present disclosure provides a method of delivering to a cell or tissue any of the above-described AAV polynucleotides or AAV genomes, comprising contacting the cell or tissue with said AAV polynucleotide or AAV genomes or contacting the cell or tissue with a particle comprising said AAV polynucleotide or AAV genome, or contacting the cell or tissue with any of the described compositions, including pharmaceutical compositions. The method of delivering the AAV polynucleotide or AAV genome to a cell or tissue can be accomplished in vitro, ex vivo, or in vivo.

### Delivery to Subjects

[0323] The present disclosure additionally provides a method of delivering to a subject, including a mammalian subject, any of the above-described AAV polynucleotides or AAV genomes comprising administering to the subject said AAV polynucleotide or AAV genome, or administering to the subject a particle comprising said AAV polynucleotide or AAV genome, or administering to the subject any of the described compositions, including pharmaceutical compositions.

[0324] The pharmaceutical compositions of viral vectors described herein may be characterized by one or more of bioavailability, therapeutic window and/or volume of distribution.

### Bioavailability

[0325] Viral vectors comprising an AADC polynucleotide of the present disclosure, when formulated into compositions with delivery/formulation agents or vehicles as described herein, may exhibit increased bioavailability as compared to compositions lacking delivery agents as described herein. As used herein, the term “bioavailability” refers to the systemic availability of a given amount of a particular agent administered to a subject. Bioavailability may be assessed by measuring the area under the curve (AUC) or the maximum serum or plasma concentration (Cₘₐₓ) of the unchanged form of a compound following administration of the compound to a mammal. AUC is a determination of the area under the curve plotting the serum or plasma concentration of a compound along the ordinate (Y-axis) against time along the abscissa (X-axis). Generally, the AUC for a particular compound may be calculated using methods known to those of ordinary skill in the art and as described in G. S. Banker, Modern Pharmaceutics, Drugs and the Pharmaceutical Sciences, v. 72, Marcel Dekker, New York, Inc., 1996, the contents of which are herein incorporated by reference in their entirety.

[0326] Cₘₐₓ values are maximum concentrations of compounds achieved in serum or plasma of a subject following administration of compounds to the subject. Cₘₐₓ values of particular compounds may be measured using methods known to those of ordinary skill in the art. As used herein, the phrases “increasing bioavailability” or “improving the pharmacokinetics,” refer to actions that may increase the systemic availability of a viral vector of the present disclosure (as measured by AUC, Cₘₐₓ, or Cₘᵢₙ) in a subject. In some embodiments, such actions may comprise co-administration with one or more delivery agents as described herein. In some embodiments, the bioavailability of viral vectors may increase by at least about 2%, at least about 5%, at least about 10%, at least about 15%, at least about 20%, at least about 25%, at least about 30%, at least about 35%, at least about 40%, at least about 45%, at least about 50%, at least about 55%, at least about 60%, at least about 65%, at least about 70%, at least about 75%, at least about 80%, at least about 85%, at least about 90%, at least about 95% or about 100%.

### Therapeutic Window

[0327] Viral vectors comprising an AADC polynucleotide of the present disclosure, when formulated with one or more delivery agents as described herein, may exhibit increases in the therapeutic window of compound and/or composition administration as compared to the therapeutic window of viral vectors administered without one or more delivery agents as described herein. As used herein, the term “therapeutic window” refers to the range of plasma concentrations, or the range of levels of therapeutically active substance at the site of action, with a high probability of eliciting a therapeutic effect. In some embodiments, therapeutic windows of viral vectors when administered in a formulation may increase by at least about 2%, at least about 5%, at least about 10%, at least about 15%, at least about 20%, at least about 25%, at least about 30%, at least about 35%, at least about 40%, at least about 45%, at least about 50%, at least about 55%, at least about 60%, at least about 65%, at least about 70%, at least about 75%, at least about 80%, at least about 85%, at least about 90%, at least about 95% or about 100%.

### Volume of Distribution

[0328] Viral vectors comprising an AADC polynucleotide of the present disclosure, when formulated with one or more delivery agents as described herein, may exhibit an improved volume of distribution (Vdist), e.g., reduced or targeted, relative to formulations lacking one or more delivery agents as described herein. Vdist relates the amount of an agent in the body to the concentration of the same agent in the blood or plasma. As used herein, the term “volume of distribution” refers to the fluid volume that would be required to contain the total amount of an agent in the body at the same concentration as in the blood or plasma: Vdist equals the amount of an agent in the body/concentration of the agent in blood or plasma. For example, for a 10 mg dose of a given agent and a plasma concentration of 10 mg/L, the volume of distribution would be 1 liter. The volume of distribution reflects the extent to which an agent is present in the extravascular tissue. Large volumes of distribution reflect the tendency of agents to bind to the tissue components as compared with plasma proteins. In clinical settings, Vdist may be used to determine loading doses to achieve steady state concentrations. In some embodiments, volumes of distribution of viral vector compositions of the present disclosure when co-administered with one or more delivery agents as described herein may decrease at least about 2%, at least about 5%, at least about 10%, at least about 15%, at least about 20%, at least about 25%, at least about 30%, at least about 35%, at least about 40%, at least about 45%, at least about 50%, at least about 55%, at least about 60%, at least about 65%, at least about 70%.

### Kits and Devices

### Kits

[0329] The present disclosure provides a variety of kits for conveniently and/or effectively carrying out methods of the present disclosure. Typically kits will comprise sufficient amounts and/or numbers of components to allow a user to perform multiple treatments of a subject(s) and/or to perform multiple experiments.

[0330] Any of the AADC vectors, AADC constructs, AADC polynucleotides, or AADC polypeptides of the present disclosure may be comprised in a kit. In some embodiments, kits may further include reagents and/or instructions for creating and/or synthesizing compounds and/or compositions of the present disclosure. In some embodiments, kits may also include one or more buffers. In some embodiments, kits may include components for making protein or nucleic acid arrays or libraries and thus, may include, for example, solid supports.

[0331] In some embodiments, kit components may be packaged either in aqueous media or in lyophilized form. The container means of the kits will generally include at least one vial, test tube, flask, bottle, syringe or other container means, into which a component may be placed, and preferably, suitably aliquoted. Where there are more than one kit component, (labeling reagent and label may be packaged together), kits may also generally contain second, third or other additional containers into which additional components may be separately placed. In some embodiments, kits may also comprise second container means for containing sterile, pharmaceutically acceptable buffers and/or other diluents. In some embodiments, various combinations of components may be comprised in one or more vial. Kits of the present disclosure may also typically include means for containing compounds and/or compositions of the present disclosure, e.g., proteins, nucleic acids, and any other reagent containers in close confinement for commercial sale. Such containers may include injection or blow-molded plastic containers into which desired vials are retained.

[0332] In some embodiments, kit components are provided in one and/or more liquid solutions. In some embodiments, liquid solutions are aqueous solutions, with sterile aqueous solutions being particularly preferred. In some embodiments, kit components may be provided as dried powder(s). When reagents and/or components are provided as dry powders, such powders may be reconstituted by the addition of suitable volumes of solvent. In some embodiments, it is envisioned that solvents may also be provided in another container means. In some embodiments, labeling dyes are provided as dried powders. In some embodiments, it is contemplated that 10, 20, 30, 40, 50, 60, 70, 80, 90, 100, 120, 120, 130, 140, 150, 160, 170, 180, 190, 200, 300, 400, 500, 600, 700, 800, 900, 1000 micrograms or at least or at most those amounts of dried dye are provided in kits. In such embodiments, dye may then be resuspended in any suitable solvent, such as DMSO.

[0333] In some embodiments, kits may include instructions for employing kit components as well as the use of any other reagent not included in the kit. Instructions may include variations that may be implemented.

### Devices

[0334] In some embodiments, AADC compounds and/or AADC compositions of the present disclosure may be combined with, coated onto or embedded in a device. Devices may include, but are not limited to stents, pumps, and/or other implantable therapeutic devices. Additionally AADC compounds and/or AADC compositions may be delivered to a subject while the subject is using a compression device such as, but not limited to, a compression device to reduce the chances of deep vein thrombosis (DVT) in a subject.

[0335] In some embodiments, AADC compounds and/or AADC compositions of the present disclosure may be delivered using a device such as, but not limited to, a stent, a tube, a catheter, a pipe, a straw, needle and/or a duct. Methods of using these devices are described herein and are known in the art.

[0336] The present disclosure provides for devices which may incorporate viral vectors that encode one or more AADC polynucleotide payload molecules. These devices contain in a stable formulation the viral vectors which may be immediately delivered to a subject in need thereof, such as a human patient.

[0337] Devices for administration may be employed to deliver the viral vectors comprising an AADC polynucleotide of the present disclosure according to single, multi- or split-dosing regimens taught herein.

[0338] Methods and devices known in the art for multi-administration to cells, organs and tissues are contemplated for use in conjunction with the methods and compositions disclosed herein as embodiments of the present disclosure. These include, for example, those methods and devices having multiple needles, hybrid devices employing for example lumens or catheters as well as devices utilizing heat, electric current or radiation driven mechanisms.

[0339] The polynucleotides of the present disclosure may be used in the treatment, prophylaxis, palliation or amelioration of any disease or disorder characterized by aberrant or undesired target expression.

[0340] In one embodiment, the AADC polynucleotides of the present disclosure may be administered to a subject using delivery systems which integrate image guided therapy and integrate imaging such as, but not limited to, laser, MRgFUS, endoscopic and robotic surgery devices.

[0341] In one embodiment, the AADC polynucleotides of the present disclosure may be administered to a subject using the CLEARPOINT® neuro intervention system by MRI Interventions, Inc. The CLEARPOINT® neuro intervention system may be used alone or in combination with any of the other administration methods and devices described herein. The CLEARPOINT® neuro intervention system helps to provide stereotactic guidance in the placement and operation of instruments or devices during the planning and operation of neurological procedures.

[0342] In one embodiment, the AADC polynucleotides of the present disclosure may be administered to a subject using the NEUROMATE® stereotactic robot system by Renishaw PLC. The NEUROMATE® system may be used alone or in combination with any of the other administration methods and devices described herein. As a non-limiting example, the NEUROMATE® system may be used with head holders, CT image localizers, frame attachments, remote controls and software.

[0343] In one embodiment, the AADC polynucleotides of the present disclosure may be administered to a subject using the Elekta MICRODRIVE™ device by Elekta AB. The MICRODRIVE™ device may be used alone or in combination with any of the other administration methods and devices described herein. As a non-limiting example, the MICRODRIVE™ device may be used to position electrodes (e.g., for micro electrode recording (MER), macro stimulation and deep brain stimulation (DBS) electrode implantation), implantation of catheters, tubes or DBS electrodes using cross-hair and A-P holders to verify position, biopsies, injections and aspirations, brain lesioning, endoscope guidance and GAMMA KNIFE® radiosurgery.

[0344] In one embodiment, the AADC polynucleotides of the present disclosure may be administered to a subject using the AXIIIS® stereotactic miniframe by MONTERIS® Medical, Inc. The AXIIIS® stereotactic miniframe may be used alone or in combination with any of the other administration methods and devices described herein. The AXIIIS® stereotactic miniframe is a trajectory alignment device which may be used for laser coagulation, biopsies, catheter placement, electrode implant, endoscopy, and clot evacuation. The miniframe allows for 360 degree interface and provides access to multiple intracranial targets with a simple adjustment. Further, the miniframe is compatible with MM.

[0345] In one embodiment, the AADC polynucleotides of the present disclosure may be administered to a subject using the INTEGRA′ CRW® system by Integra LifeSciences Corporation. The INTEGRA′ CRW® system may be used alone or in combination with any of the other administration methods and devices described herein. The CRW® system may be used for various applications such as, but not limited to, stereotactic surgery, microsurgery, catheterization and biopsy. The CRW® system is designed to provide accuracy to those who use the system (e.g., thumb lock screws, Vernier scaling, double bolt fixation, and a solid frame).

[0346] In one embodiment, the AADC polynucleotides of the present disclosure may be administered to a subject using the EPOCH® solution system by Stereotaxis, Inc. which may include the NIOBE® ES magnetic navigation system, the VDRIVE® robotic navigation system and/or the ODYSSEY® information solution (all by Stereotaxis, Inc.). The EPOCH® solution system may be used alone or in combination with any of the other administration methods and devices described herein. As a non-limiting example, the NIOBE® ES magnetic navigation system may be used to accurately contact a subject. As another non-limiting example the NIOBE® ES magnetic system may be used with the VDRIVE® robotic navigation system to provide precise movement and stability.

[0347] In one embodiment, the AADC polynucleotides of the present disclosure may be administered to a subject using the STEALTHSTATION® TREON™ Navigation system from Medtronic as described in Hwu, W. L., et al., 2012. Gene therapy for aromatic L-amino acid decarboxylase deficiency. Sci. Transl. Med. Vol. 4, 134ra61. The StealthStation® TREON™ system allows for the use of pre-surgery images from X-ray, CT, MRI or ultrasound and combines them with real-time images taken by LED cameras during the surgery to assist in guiding the surgeon to the desired target site in the brain or spinal cord.

[0348] In one embodiment, the AADC polynucleotides of the present disclosure may be administered to a subject using a NeuroStation workstation which uses frameless stereotactic methods to provide image-guidance for applications such as, but not limited to, surgical planning, biopsies, craniotomies, endoscopy, intra-operative ultrasound and radiation therapy.

[0349] In one embodiment, the AADC polynucleotides of the present disclosure may be administered to a subject using a robotic stereotaxis system such as, but not limited to the device described in U.S. Pat. No. 5,078,140, the contents of which are herein incorporated by reference in their entirety. The robotic arm of the device may be used to precisely orient the surgical tools or other implements used to conduct a procedure.

[0350] In one embodiment, the AADC polynucleotides of the present disclosure may be administered to a subject using an automatic delivery system such as, but not limited to the device described in U.S. Pat. No. 5,865,744, the contents of which are herein incorporated by reference in their entirety. Based on the images gathered by the delivery system, the computer adjusts the administration of the needle to be the appropriate depth for the particular subject.

[0351] In one embodiment, the AADC polynucleotides of the present disclosure may be administered to a subject who is simultaneously using during administration, and/or uses for a period of time before and/or after administration a compression device such as, but not limited to, a compression device which reduces the chances of deep vein thrombosis (DVT) in a subject. The compression device may be used for at least 5 minutes, 15 minutes, 30 minutes, 45 minutes, 1 hour, 2 hours, 3 hours, 4 hours, 5 hours, 6 hours, 7 hours, 8 hours, or more than 8 hours before a subject is administered the AADC polynucleotides. The compression device may be used for at least 5 minutes, 15 minutes, 30 minutes, 45 minutes, 1 hour, 2 hours, 3 hours, 4 hours, 5 hours, 6 hours, 7 hours, 8 hours, 9 hours, 10 hours, 11 hours, 12 hours, 13 hours, 14 hours, 15 hours, 16 hours, 17 hours, 18 hours, 19 hours, 20 hours, 21 hours, 22 hours, 23 hours, 1 day, 2 days, 3 days, 4 days, 5 days, 6 days, 1 week, 2 weeks, 3 weeks or a month after the AADC polynucleotides are administered. As a non-limiting example, the compression device is used simultaneously during the procedure of the delivery of the AADC polynucleotides. As another non-limiting example, the compression device is used before the administration of the AADC polynucleotides. As another non-limiting example, the compression device is used after administration of the AADC polynucleotides. As another non-limiting example, the compression device is used before, during and after administration of the AADC polynucleotides.

[0352] Non-limiting examples, of compression devices include ActiveCare+S.F.T. intermittent compression device, ActiveCare+S.F.T pneumatic compression device, DVTlite's Venowave, KCI system compression pump, Aircast VenaFlow system, SCD Express Compression System or Bio Compression Systems, Inc. pneumatic compression therapy equipment (e.g., the pump may be selected from Model SC-2004, Model SC-2004-FC, Model SC-3004, Model SC-3004-FC, Model SC-2008, Model SC-2008-DL, Model SC-3008-T, the BioCryo system, Model IC-BAP-DL or multi-flo DVT combo IC 1545-DL and the garment used with the pump may be a 4 chamber, 8 chamber, BioCryo, Multi-Flo or BioArterial garment).

### Definitions

[0353] At various places in the present specification, substituents of compounds of the present disclosure are disclosed in groups or in ranges. It is specifically intended that the present disclosure include each and every individual sub-combination of the members of such groups and ranges. The following is a non-limiting list of term definitions.

[0354] Adeno-associated virus: The term “adeno-associated virus” or “AAV” as used herein refers to members of the dependovirus genus comprising any particle, sequence, gene, protein, or component derived therefrom. The term “AAV particle” as used herein comprises a capsid and a polynucleotide. The AAV particle may be derived from any serotype, described herein or known in the art, including combinations of serotypes (i.e., “pseudotyped” AAV) or from various genomes (e.g., single stranded or self-complementary). In addition, the AAV particle may be replication defective and/or targeted.

[0355] Activity: As used herein, the term “activity” refers to the condition in which things are happening or being done. Compositions described herein may have activity and this activity may involve one or more biological events.

[0356] Administered in combination: As used herein, the term “administered in combination” or “combined administration” refers to simultaneous exposure to two or more agents (e.g., AAV) administered at the same time or within an interval such that the subject is at some point in time simultaneously exposed to both and/or such that there may be an overlap in the effect of each agent on the patient. In some embodiments, at least one dose of one or more agents is administered within about 24 hours, 12 hours, 6 hours, 3 hours, 1 hour, 30 minutes, 15 minutes, 10 minutes, 5 minutes, or 1 minute of at least one dose of one or more other agents. In some embodiments, administration occurs in overlapping dosage regimens. As used herein, the term “dosage regimen” refers to a plurality of doses spaced apart in time. Such doses may occur at regular intervals or may include one or more hiatus in administration. In some embodiments, the administration of individual doses of one or more compounds and/or compositions of the present disclosure, as described herein, are spaced sufficiently closely together such that a combinatorial (e.g., a synergistic) effect is achieved.

[0357] Amelioration: As used herein, the term “amelioration” or “ameliorating” refers to a lessening of severity of at least one indicator of a condition or disease. For example, in the context of neurodegeneration disorder, amelioration includes the reduction of neuron loss.

[0358] Animal: As used herein, the term “animal” refers to any member of the animal kingdom. In some embodiments, “animal” refers to humans at any stage of development. In some embodiments, “animal” refers to non-human animals at any stage of development. In certain embodiments, the non-human animal is a mammal (e.g., a rodent, a mouse, a rat, a rabbit, a monkey, a dog, a cat, a sheep, cattle, a primate, or a pig). In some embodiments, animals include, but are not limited to, mammals, birds, reptiles, amphibians, fish, and worms. In some embodiments, the animal is a transgenic animal, genetically-engineered animal, or a clone.

[0359] Antisense strand: As used herein, the term “the antisense strand” or “the first strand” or “the guide strand” of a siRNA molecule refers to a strand that is substantially complementary to a section of about 10-50 nucleotides, e.g., about 15-30, 16-25, 18-23 or 19-22 nucleotides of the mRNA of the gene targeted for silencing. The antisense strand or first strand has sequence sufficiently complementary to the desired target mRNA sequence to direct target-specific silencing, e.g., complementarity sufficient to trigger the destruction of the desired target mRNA by the RNAi machinery or process.

[0360] Approximately: As used herein, the term “approximately” or “about,” as applied to one or more values of interest, refers to a value that is similar to a stated reference value. In certain embodiments, the term “approximately” or “about” refers to a range of values that fall within 25%, 20%, 19%, 18%, 17%, 16%, 15%, 14%, 13%, 12%, 11%, 10%, 9%, 8%, 7%, 6%, 5%, 4%, 3%, 2%, 1%, or less in either direction (greater than or less than) of the stated reference value unless otherwise stated or otherwise evident from the context (except where such number would exceed 100% of a possible value).

[0361] Associated with: As used herein, the terms “associated with,” “conjugated,” “linked,” “attached,” and “tethered,” when used with respect to two or more moieties, mean that the moieties are physically associated or connected with one another, either directly or via one or more additional moieties that serve as linking agents, to form a structure that is sufficiently stable so that the moieties remain physically associated under the conditions in which the structure is used, e.g., physiological conditions. An “association” need not be strictly through direct covalent chemical bonding. It may also suggest ionic or hydrogen bonding or a hybridization based connectivity sufficiently stable such that the “associated” entities remain physically associated.

[0362] Biomolecule: As used herein, the term “biomolecule” is any natural molecule which is amino acid-based, nucleic acid-based, carbohydrate-based or lipid-based, and the like.

[0363] Biologically active: As used herein, the phrase “biologically active” refers to a characteristic of any substance (e.g., an AAV) that has activity in or on a biological system and/or organism. For instance, a substance that, when administered to an organism, has a biological effect on that organism, is considered to be biologically active. In particular embodiments, a compounds and/or compositions of the present disclosure may be considered biologically active if even a portion of is biologically active or mimics an activity considered to biologically relevant.

[0364] Biological system: As used herein, the term “biological system” refers to a group of organs, tissues, cells, intracellular components, proteins, nucleic acids, molecules (including, but not limited to biomolecules) that function together to perform a certain biological task within cellular membranes, cellular compartments, cells, tissues, organs, organ systems, multicellular organisms, or any biological entity. In some embodiments, biological systems are cell signaling pathways comprising intracellular and/or extracellular cell signaling biomolecules. In some embodiments, biological systems comprise growth factor signaling events within the extracellular/cellular matrix and/or cellular niches.

[0365] Complementary and substantially complementary: As used herein, the term “complementary” refers to the ability of polynucleotides to form base pairs with one another. Base pairs are typically formed by hydrogen bonds between nucleotide units in antiparallel polynucleotide strands. Complementary polynucleotide strands can form base pairs in the Watson-Crick manner (e.g., A to T, A to U, C to G), or in any other manner that allows for the formation of duplexes. As persons skilled in the art are aware, when using RNA as opposed to DNA, uracil rather than thymine is the base that is considered to be complementary to adenosine. However, when a U is denoted in the context of the present disclosure, the ability to substitute a T is implied, unless otherwise stated. Perfect complementarity or 100% complementarity refers to the situation in which each nucleotide unit of one polynucleotide strand can form a hydrogen bond with a nucleotide unit of a second polynucleotide strand. Less than perfect complementarity refers to the situation in which some, but not all, nucleotide units of two strands can form hydrogen bonds with each other. For example, for two 20-mers, if only two base pairs on each strand can form hydrogen bonds with each other, the polynucleotide strands exhibit 10% complementarity. In the same example, if 18 base pairs on each strand can form hydrogen bonds with each other, the polynucleotide strands exhibit 90% complementarity. As used herein, the term “substantially complementary” means that the siRNA has a sequence (e.g., in the antisense strand) which is sufficient to bind the desired target mRNA, and to trigger the RNA silencing of the target mRNA.

[0366] Compound: As used herein, the term “compound,” refers to a distinct chemical entity. In some embodiments, a particular compound may exist in one or more isomeric or isotopic forms (including, but not limited to stereoisomers, geometric isomers and isotopes). In some embodiments, a compound is provided or utilized in only a single such form. In some embodiments, a compound is provided or utilized as a mixture of two or more such forms (including, but not limited to a racemic mixture of stereoisomers). Those of skill in the art appreciate that some compounds exist in different such forms, show different properties and/or activities (including, but not limited to biological activities). In such cases it is within the ordinary skill of those in the art to select or avoid particular forms of the compound for use in accordance with the present disclosure. For example, compounds that contain asymmetrically substituted carbon atoms can be isolated in optically active or racemic forms. Methods on how to prepare optically active forms from optically active starting materials are known in the art, such as by resolution of racemic mixtures or by stereoselective synthesis.

[0367] Conserved: As used herein, the term “conserved” refers to nucleotides or amino acid residues of polynucleotide or polypeptide sequences, respectively, that are those that occur unaltered in the same position of two or more sequences being compared. Nucleotides or amino acids that are relatively conserved are those that are conserved among more related sequences than nucleotides or amino acids appearing elsewhere in the sequences.

[0368] In some embodiments, two or more sequences are said to be “completely conserved” if they are 100% identical to one another. In some embodiments, two or more sequences are said to be “highly conserved” if they are at least 70% identical, at least 80% identical, at least 90% identical, or at least 95% identical to one another. In some embodiments, two or more sequences are said to be “highly conserved” if they are about 70% identical, about 80% identical, about 90% identical, about 95%, about 98%, or about 99% identical to one another. In some embodiments, two or more sequences are said to be “conserved” if they are at least 30% identical, at least 40% identical, at least 50% identical, at least 60% identical, at least 70% identical, at least 80% identical, at least 90% identical, or at least 95% identical to one another. In some embodiments, two or more sequences are said to be “conserved” if they are about 30% identical, about 40% identical, about 50% identical, about 60% identical, about 70% identical, about 80% identical, about 90% identical, about 95% identical, about 98% identical, or about 99% identical to one another. Conservation of sequence may apply to the entire length of an oligonucleotide or polypeptide or may apply to a portion, region or feature thereof.

[0369] In one embodiment, conserved sequences are not contiguous. Those skilled in the art are able to appreciate how to achieve alignment when gaps in contiguous alignment are present between sequences, and to align corresponding residues not withstanding insertions or deletions present.

[0370] Delivery: As used herein, “delivery” refers to the act or manner of delivering parvovirus, e.g. an AAV and/or AAV compound, substance, entity, moiety, cargo or payload to a target. Such target may be a cell, tissue, organ, organism, or system (whether biological or production).

[0371] Delivery Agent: As used herein, “delivery agent” refers to any agent which facilitates, at least in part, the delivery of one or more substances (including, but not limited to a compounds and/or compositions of the present disclosure, e.g., viral particles or expression vectors) to targeted cells.

[0372] Destabilized: As used herein, the term “destable,” “destabilize,” or “destabilizing region” means a region or molecule that is less stable than a starting, reference, wild-type or native form of the same region or molecule.

[0373] Detectable label: As used herein, “detectable label” refers to one or more markers, signals, or moieties which are attached, incorporated or associated with another entity, which markers, signals or moieties are readily detected by methods known in the art including radiography, fluorescence, chemiluminescence, enzymatic activity, absorbance, immunological detection and the like. Detectable labels may include radioisotopes, fluorophores, chromophores, enzymes, dyes, metal ions, ligands, biotin, avidin, streptavidin and haptens, quantum dots, polyhistidine tags, myc tags, flag tags, human influenza hemagglutinin (HA) tags and the like. Detectable labels may be located at any position in the entity with which they are attached, incorporated or associated. For example, when attached, incorporated in or associated with a peptide or protein, they may be within the amino acids, the peptides, or proteins, or located at the N- or C-termini.

[0374] Effective amount: As used herein, the term “effective amount” of an agent is that amount sufficient to effect beneficial or desired results, for example, upon single or multiple dose administration to a subject cell, in curing, alleviating, relieving or improving one or more symptoms of a disorder and, as such, an “effective amount” depends upon the context in which it is being applied. For example, in the context of administering an agent that treats ALS, an effective amount of an agent is, for example, an amount sufficient to achieve treatment, as defined herein, of ALS, as compared to the response obtained without administration of the agent.

[0375] Engineered: As used herein, embodiments are “engineered” when they are designed to have a feature or property, whether structural or chemical, that varies from a starting point, wild-type or native molecule. Thus, engineered agents or entities are those whose design and/or production include an act of the hand of man.

[0376] Epitope: As used herein, an “epitope” refers to a surface or region on a molecule that is capable of interacting with a biomolecule. For example a protein may contain one or more amino acids, e.g., an epitope, which interacts with an antibody, e.g., a biomolecule. In some embodiments, when referring to a protein or protein module, an epitope may comprise a linear stretch of amino acids or a three dimensional structure formed by folded amino acid chains.

[0377] Expression: As used herein, “expression” of a nucleic acid sequence refers to one or more of the following events: (1) production of an RNA template from a DNA sequence (e.g., by transcription); (2) processing of an RNA transcript (e.g., by splicing, editing, 5′ cap formation, and/or 3′ end processing); (3) translation of an RNA into a polypeptide or protein; (4) folding of a polypeptide or protein; and (5) post-translational modification of a polypeptide or protein.

[0378] Feature: As used herein, a “feature” refers to a characteristic, a property, or a distinctive element.

[0379] Formulation: As used herein, a “formulation” includes at least a compound and/or composition of the present disclosure (e.g., a vector, AAV particle, etc.) and a delivery agent.

[0380] Fragment: A “fragment,” as used herein, refers to a contiguous portion of a whole. For example, fragments of proteins may comprise polypeptides obtained by digesting full-length protein isolated from cultured cells. In some embodiments, a fragment of a protein includes at least 3, 4, 5, 6, 7, 8, 9, 10, 11, 12, 13, 14, 15, 16, 17, 18, 19, 20, 25, 30, 35, 40, 45, 50, 55, 60, 65, 70, 75, 80, 85, 90, 95, 100, 150, 200, 250 or more amino acids. In some embodiments, fragments of an antibody include portions of an antibody subjected to enzymatic digestion or synthesized as such.

[0381] Functional: As used herein, a “functional” biological molecule is a biological entity with a structure and in a form in which it exhibits a property and/or activity by which it is characterized.

[0382] Gene expression: The term “gene expression” refers to the process by which a nucleic acid sequence undergoes successful transcription and in most instances translation to produce a protein or peptide. For clarity, when reference is made to measurement of “gene expression”, this should be understood to mean that measurements may be of the nucleic acid product of transcription, e.g., RNA or mRNA or of the amino acid product of translation, e.g., polypeptides or peptides. Methods of measuring the amount or levels of RNA, mRNA, polypeptides and peptides are well known in the art.

[0383] Homology: As used herein, the term “homology” refers to the overall relatedness between polymeric molecules, e.g. between nucleic acid molecules (e.g. DNA molecules and/or RNA molecules) and/or between polypeptide molecules. In some embodiments, polymeric molecules are considered to be “homologous” to one another if their sequences are at least 25%, 30%, 35%, 40%, 45%, 50%, 55%, 60%, 65%, 70%, 75%, 80%, 85%, 90%, 95%, or 99% identical or similar. The term “homologous” necessarily refers to a comparison between at least two sequences (polynucleotide or polypeptide sequences). In accordance with the disclosure, two polynucleotide sequences are considered to be homologous if the polypeptides they encode are at least about 50%, 60%, 70%, 80%, 90%, 95%, or even 99% for at least one stretch of at least about 20 amino acids. In some embodiments, homologous polynucleotide sequences are characterized by the ability to encode a stretch of at least 4-5 uniquely specified amino acids. For polynucleotide sequences less than 60 nucleotides in length, homology is typically determined by the ability to encode a stretch of at least 4-5 uniquely specified amino acids. In accordance with the disclosure, two protein sequences are considered to be homologous if the proteins are at least about 50%, 60%, 70%, 80%, or 90% identical for at least one stretch of at least about 20 amino acids. In many embodiments, homologous protein may show a large overall degree of homology and a high degree of homology over at least one short stretch of at least 3, 4, 5, 6, 7, 8, 9, 10, 11, 12, 13, 14, 15, 16, 17, 18, 19, 20, 25, 30, 35, 40, 45, 50 or more amino acids. In many embodiments, homologous proteins share one or more characteristic sequence elements. As used herein, the term “characteristic sequence element” refers to a motif present in related proteins. In some embodiments, the presence of such motifs correlates with a particular activity (such as biological activity).

[0384] Identity: As used herein, the term “identity” refers to the overall relatedness between polymeric molecules, e.g., between oligonucleotide molecules (e.g. DNA molecules and/or RNA molecules) and/or between polypeptide molecules. Calculation of the percent identity of two polynucleotide sequences, for example, may be performed by aligning the two sequences for optimal comparison purposes (e.g., gaps can be introduced in one or both of a first and a second nucleic acid sequences for optimal alignment and non-identical sequences can be disregarded for comparison purposes). In certain embodiments, the length of a sequence aligned for comparison purposes is at least 30%, at least 40%, at least 50%, at least 60%, at least 70%, at least 80%, at least 90%, at least 95%, or 100% of the length of the reference sequence. The nucleotides at corresponding nucleotide positions are then compared. When a position in the first sequence is occupied by the same nucleotide as the corresponding position in the second sequence, then the molecules are identical at that position. The percent identity between the two sequences is a function of the number of identical positions shared by the sequences, taking into account the number of gaps, and the length of each gap, which needs to be introduced for optimal alignment of the two sequences. The comparison of sequences and determination of percent identity between two sequences can be accomplished using a mathematical algorithm. For example, the percent identity between two nucleotide sequences can be determined using methods such as those described in Computational Molecular Biology, Lesk, A. M., ed., Oxford University Press, New York, 1988; Biocomputing: Informatics and Genome Projects, Smith, D. W., ed., Academic Press, New York, 1993; Sequence Analysis in Molecular Biology, von Heinje, G., Academic Press, 1987; Computer Analysis of Sequence Data, Part I, Griffin, A. M., and Griffin, H. G., eds., Humana Press, New Jersey, 1994; and Sequence Analysis Primer, Gribskov, M. and Devereux, J., eds., M Stockton Press, New York, 1991; each of which is incorporated herein by reference in its entirety. For example, the percent identity between two nucleotide sequences can be determined, for example using the algorithm of Meyers and Miller (CABIOS, 1989, 4:11-17), which has been incorporated into the ALIGN program (version 2.0) using a PAM120 weight residue table, a gap length penalty of 12 and a gap penalty of 4. The percent identity between two nucleotide sequences can, alternatively, be determined using the GAP program in the GCG software package using an NWSgapdna.CMP matrix. Methods commonly employed to determine percent identity between sequences include, but are not limited to those disclosed in Carillo, H., and Lipman, D., SIAM J Applied Math., 48:1073 (1988); incorporated herein by reference in its entirety. Techniques for determining identity are codified in publicly available computer programs. Computer software to determine homology between two sequences include, but are not limited to, GCG program package, Devereux, J., et al., Nucleic Acids Research, 12(1), 387 (1984), BLASTP, BLASTN, and FASTA Altschul, S. F. et al., J. Molec. Biol., 215, 403 (1990).

[0385] Inhibit expression of a gene: As used herein, the phrase “inhibit expression of a gene” means to cause a reduction in the amount of an expression product of the gene. The expression product may be RNA transcribed from the gene (e.g. mRNA) or a polypeptide translated from mRNA transcribed from the gene. Typically a reduction in the level of mRNA results in a reduction in the level of a polypeptide translated therefrom. The level of expression may be determined using standard techniques for measuring mRNA or protein.

[0386] In vitro: As used herein, the term “in vitro” refers to events that occur in an artificial environment, e.g., in a test tube or reaction vessel, in cell culture, in a Petri dish, etc., rather than within an organism (e.g., animal, plant, or microbe).

[0387] In vivo: As used herein, the term “in vivo” refers to events that occur within an organism (e.g., animal, plant, or microbe or cell or tissue thereof).

[0388] Isolated: As used herein, the term “isolated” is synonymous with “separated”, but carries with it the inference separation was carried out by the hand of man. In one embodiment, an isolated substance or entity is one that has been separated from at least some of the components with which it was previously associated (whether in nature or in an experimental setting). Isolated substances may have varying levels of purity in reference to the substances from which they have been associated. Isolated substances and/or entities may be separated from at least about 10%, about 20%, about 30%, about 40%, about 50%, about 60%, about 70%, about 80%, about 90%, or more of the other components with which they were initially associated. In some embodiments, isolated agents are more than about 80%, about 85%, about 90%, about 91%, about 92%, about 93%, about 94%, about 95%, about 96%, about 97%, about 98%, about 99%, or more than about 99% pure. As used herein, a substance is “pure” if it is substantially free of other components.

[0389] Substantially isolated: By “substantially isolated” is meant that the compound is substantially separated from the environment in which it was formed or detected. Partial separation can include, for example, a composition enriched in the compound of the present disclosure. Substantial separation can include compositions containing at least about 50%, at least about 60%, at least about 70%, at least about 80%, at least about 90%, at least about 95%, at least about 97%, or at least about 99% by weight of the compound of the present disclosure, or salt thereof. Methods for isolating compounds and their salts are routine in the art. In some embodiments, isolation of a substance or entity includes disruption of chemical associations and/or bonds. In some embodiments, isolation includes only the separation from components with which the isolated substance or entity was previously combined and does not include such disruption.

[0390] Modified: As used herein, the term “modified” refers to a changed state or structure of a molecule or entity as compared with a parent or reference molecule or entity. Molecules may be modified in many ways including chemically, structurally, and functionally. In some embodiments, compounds and/or compositions of the present disclosure are modified by the introduction of non-natural amino acids, or non-natural nucleotides.

[0391] Mutation: As used herein, the term “mutation” refers to a change and/or alteration. In some embodiments, mutations may be changes and/or alterations to proteins (including peptides and polypeptides) and/or nucleic acids (including polynucleic acids). In some embodiments, mutations comprise changes and/or alterations to a protein and/or nucleic acid sequence. Such changes and/or alterations may comprise the addition, substitution and or deletion of one or more amino acids (in the case of proteins and/or peptides) and/or nucleotides (in the case of nucleic acids and or polynucleic acids). In embodiments wherein mutations comprise the addition and/or substitution of amino acids and/or nucleotides, such additions and/or substitutions may comprise 1 or more amino acid and/or nucleotide residues and may include modified amino acids and/or nucleotides.

[0392] Naturally occurring: As used herein, “naturally occurring” means existing in nature without artificial aid, or involvement of the hand of man.

[0393] Non-human vertebrate: As used herein, a “non-human vertebrate” includes all vertebrates except Homo sapiens, including wild and domesticated species. Examples of non-human vertebrates include, but are not limited to, mammals, such as alpaca, banteng, bison, camel, cat, cattle, deer, dog, donkey, gayal, goat, guinea pig, horse, llama, mule, pig, rabbit, reindeer, sheep water buffalo, and yak.

[0394] Nucleic acid: As used herein, the term “nucleic acid”, “polynucleotide” and “oligonucleotide” refer to any nucleic acid polymers composed of either polydeoxyribonucleotides (containing 2-deoxy-D-ribose), or polyribonucleotides (containing D-ribose), or any other type of polynucleotide which is an N glycoside of a purine or pyrimidine base, or modified purine or pyrimidine bases. There is no intended distinction in length between the term “nucleic acid”, “polynucleotide” and “oligonucleotide”, and these terms will be used interchangeably. These terms refer only to the primary structure of the molecule. Thus, these terms include double- and single-stranded DNA, as well as double- and single stranded RNA.

[0395] Off-target: As used herein, “off target” refers to any unintended effect on any one or more target, gene and/or cellular transcript.

[0396] Operably linked: As used herein, the phrase “operably linked” refers to a functional connection between two or more molecules, constructs, transcripts, entities, moieties or the like.

[0397] Particle: As used herein, a “particle” is a virus comprised of at least two components, a protein capsid and a polynucleotide sequence enclosed within the capsid.

[0398] Patient: As used herein, “patient” refers to a subject who may seek or be in need of treatment, requires treatment, is receiving treatment, will receive treatment, or a subject who is under care by a trained (e.g., licensed) professional for a particular disease or condition.

[0399] Payload: As used herein, “payload” refers to one or more polynucleotides or polynucleotide regions encoded by or within a viral genome or an expression product of such polynucleotide or polynucleotide region, e.g., a transgene, a polynucleotide encoding a polypeptide or multi-polypeptide or a modulatory nucleic acid or regulatory nucleic acid.

[0400] Payload construct: As used herein, “payload construct” is one or more polynucleotide regions encoding or comprising a payload that is flanked on one or both sides by an inverted terminal repeat (ITR) sequence. The payload construct is a template that is replicated in a viral production cell to produce a viral genome.

[0401] Payload construct vector: As used herein, “payload construct vector” is a vector encoding or comprising a payload construct, and regulatory regions for replication and expression in bacterial cells.

[0402] Payload construct expression vector: As used herein, a “payload construct expression vector” is a vector encoding or comprising a payload construct and which further comprises one or more polynucleotide regions encoding or comprising components for viral expression in a viral replication cell.

[0403] Peptide: As used herein, the term “peptide” refers to a chain of amino acids that is less than or equal to about 50 amino acids long, e.g., about 5, 10, 15, 20, 25, 30, 35, 40, 45, or 50 amino acids long.

[0404] Pharmaceutically acceptable: The phrase “pharmaceutically acceptable” is employed herein to refer to those compounds, materials, compositions, and/or dosage forms which are, within the scope of sound medical judgment, suitable for use in contact with the tissues of human beings and animals without excessive toxicity, irritation, allergic response, or other problem or complication, commensurate with a reasonable benefit/risk ratio.

[0405] Pharmaceutically acceptable excipients: As used herein, the term “pharmaceutically acceptable excipient,” as used herein, refers to any ingredient other than active agents (e.g., as described herein) present in pharmaceutical compositions and having the properties of being substantially nontoxic and non-inflammatory in subjects. In some embodiments, pharmaceutically acceptable excipients are vehicles capable of suspending and/or dissolving active agents. Excipients may include, for example: antiadherents, antioxidants, binders, coatings, compression aids, disintegrants, dyes (colors), emollients, emulsifiers, fillers (diluents), film formers or coatings, flavors, fragrances, glidants (flow enhancers), lubricants, preservatives, printing inks, sorbents, suspending or dispersing agents, sweeteners, and waters of hydration. Excipients include, but are not limited to: butylated hydroxytoluene (BHT), calcium carbonate, calcium phosphate (dibasic), calcium stearate, croscarmellose, crosslinked polyvinyl pyrrolidone, citric acid, crospovidone, cysteine, ethylcellulose, gelatin, hydroxypropyl cellulose, hydroxypropyl methylcellulose, lactose, magnesium stearate, maltitol, mannitol, methionine, methylcellulose, methyl paraben, microcrystalline cellulose, polyethylene glycol, polyvinyl pyrrolidone, povidone, pregelatinized starch, propyl paraben, retinyl palmitate, shellac, silicon dioxide, sodium carboxymethyl cellulose, sodium citrate, sodium starch glycolate, sorbitol, starch (corn), stearic acid, sucrose, talc, titanium dioxide, vitamin A, vitamin E, vitamin C, and xylitol.

[0406] Pharmaceutically acceptable salts: Pharmaceutically acceptable salts of the compounds described herein are forms of the disclosed compounds wherein the acid or base moiety is in its salt form (e.g., as generated by reacting a free base group with a suitable organic acid). Examples of pharmaceutically acceptable salts include, but are not limited to, mineral or organic acid salts of basic residues such as amines; alkali or organic salts of acidic residues such as carboxylic acids; and the like. Representative acid addition salts include acetate, adipate, alginate, ascorbate, aspartate, benzenesulfonate, benzoate, bisulfate, borate, butyrate, camphorate, camphorsulfonate, citrate, cyclopentanepropionate, digluconate, dodecylsulfate, ethanesulfonate, fumarate, glucoheptonate, glycerophosphate, hemisulfate, heptonate, hexanoate, hydrobromide, hydrochloride, hydroiodide, 2-hydroxy-ethanesulfonate, lactobionate, lactate, laurate, lauryl sulfate, malate, maleate, malonate, methanesulfonate, 2-naphthalenesulfonate, nicotinate, nitrate, oleate, oxalate, palmitate, pamoate, pectinate, persulfate, 3-phenylpropionate, phosphate, picrate, pivalate, propionate, stearate, succinate, sulfate, tartrate, thiocyanate, toluenesulfonate, undecanoate, valerate salts, and the like. Representative alkali or alkaline earth metal salts include sodium, lithium, potassium, calcium, magnesium, and the like, as well as nontoxic ammonium, quaternary ammonium, and amine cations, including, but not limited to ammonium, tetramethylammonium, tetraethylammonium, methylamine, dimethylamine, trimethylamine, triethylamine, ethylamine, and the like. Pharmaceutically acceptable salts include the conventional non-toxic salts, for example, from non-toxic inorganic or organic acids. In some embodiments a pharmaceutically acceptable salt is prepared from a parent compound which contains a basic or acidic moiety by conventional chemical methods. Generally, such salts can be prepared by reacting the free acid or base forms of these compounds with a stoichiometric amount of the appropriate base or acid in water or in an organic solvent, or in a mixture of the two; generally, nonaqueous media like ether, ethyl acetate, ethanol, isopropanol, or acetonitrile are preferred. Lists of suitable salts are found in Remington's Pharmaceutical Sciences, 17^{th} ed., Mack Publishing Company, Easton, Pa., 1985, p. 1418, Pharmaceutical Salts: Properties, Selection, and Use, P. H. Stahl and C. G. Wermuth (eds.), Wiley-VCH, 2008, and Berge et al., Journal of Pharmaceutical Science, 66, 1-19 (1977), each of which is incorporated herein by reference in its entirety. Pharmaceutically acceptable solvate: The term “pharmaceutically acceptable solvate,” as used herein, refers to a crystalline form of a compound wherein molecules of a suitable solvent are incorporated in the crystal lattice. For example, solvates may be prepared by crystallization, recrystallization, or precipitation from a solution that includes organic solvents, water, or a mixture thereof. Examples of suitable solvents are ethanol, water (for example, mono-, di-, and tri-hydrates), N-methylpyrrolidinone (NMP), dimethyl sulfoxide (DMSO), N,N′-dimethylformamide (DMF), N,N′-dimethylacetamide (DMAC), 1,3-dimethyl-2-imidazolidinone (DMEU), 1,3-dimethyl-3,4,5,6-tetrahydro-2-(1H)-pyrimidinone (DMPU), acetonitrile (ACN), propylene glycol, ethyl acetate, benzyl alcohol, 2-pyrrolidone, benzyl benzoate, and the like. When water is the solvent, the solvate is referred to as a “hydrate.” In some embodiments, the solvent incorporated into a solvate is of a type or at a level that is physiologically tolerable to an organism to which the solvate is administered (e.g., in a unit dosage form of a pharmaceutical composition).

[0407] Pharmacokinetic: As used herein, “pharmacokinetic” refers to any one or more properties of a molecule or compound as it relates to the determination of the fate of substances administered to living organisms. Pharmacokinetics are divided into several areas including the extent and rate of absorption, distribution, metabolism and excretion. This is commonly referred to as ADME where: (A) Absorption is the process of a substance entering the blood circulation; (D) Distribution is the dispersion or dissemination of substances throughout the fluids and tissues of the body; (M) Metabolism (or Biotransformation) is the irreversible transformation of parent compounds into daughter metabolites; and (E) Excretion (or Elimination) refers to the elimination of the substances from the body. In rare cases, some drugs irreversibly accumulate in body tissue.

[0408] Physicochemical: As used herein, “physicochemical” means of or relating to a physical and/or chemical property.

[0409] Preventing: As used herein, the term “preventing” refers to partially or completely delaying onset of an infection, disease, disorder and/or condition; partially or completely delaying onset of one or more symptoms, features, or clinical manifestations of a particular infection, disease, disorder, and/or condition; partially or completely delaying onset of one or more symptoms, features, or manifestations of a particular infection, disease, disorder, and/or condition; partially or completely delaying progression from an infection, a particular disease, disorder and/or condition; and/or decreasing the risk of developing pathology associated with the infection, the disease, disorder, and/or condition.

[0410] Proliferate: As used herein, the term “proliferate” means to grow, expand, replicate or increase or cause to grow, expand, replicate or increase. “Proliferative” means having the ability to proliferate. “Anti-proliferative” means having properties counter to or in opposition to proliferative properties.

[0411] Protein of interest: As used herein, the terms “proteins of interest” or “desired proteins” include those provided herein and fragments, mutants, variants, and alterations thereof.

[0412] Purified: As used herein, the term “purify” means to make substantially pure or clear from unwanted components, material defilement, admixture or imperfection. “Purified” refers to the state of being pure. “Purification” refers to the process of making pure.

[0413] Region: As used herein, the term “region” refers to a zone or general area. In some embodiments, when referring to a protein or protein module, a region may comprise a linear sequence of amino acids along the protein or protein module or may comprise a three dimensional area, an epitope and/or a cluster of epitopes. In some embodiments, regions comprise terminal regions. As used herein, the term “terminal region” refers to regions located at the ends or termini of a given agent. When referring to proteins, terminal regions may comprise N- and/or C-termini. N-termini refer to the end of a protein comprising an amino acid with a free amino group. C-termini refer to the end of a protein comprising an amino acid with a free carboxyl group. N- and/or C-terminal regions may therefore comprise the N- and/or C-termini as well as surrounding amino acids. In some embodiments, N- and/or C-terminal regions comprise from about 3 amino acid to about 30 amino acids, from about 5 amino acids to about 40 amino acids, from about 10 amino acids to about 50 amino acids, from about 20 amino acids to about 100 amino acids and/or at least 100 amino acids. In some embodiments, N-terminal regions may comprise any length of amino acids that includes the N-terminus, but does not include the C-terminus. In some embodiments, C-terminal regions may comprise any length of amino acids, which include the C-terminus, but do not comprise the N-terminus.

[0414] In some embodiments, when referring to a polynucleotide, a region may comprise a linear sequence of nucleic acids along the polynucleotide or may comprise a three dimensional area, secondary structure, or tertiary structure. In some embodiments, regions comprise terminal regions. As used herein, the term “terminal region” refers to regions located at the ends or termini of a given agent. When referring to polynucleotides, terminal regions may comprise 5′ and 3′ termini. 5′ termini refer to the end of a polynucleotide comprising a nucleic acid with a free phosphate group. 3′ termini refer to the end of a polynucleotide comprising a nucleic acid with a free hydroxyl group. 5′ and 3′ regions may there for comprise the 5′ and 3′ termini as well as surrounding nucleic acids. In some embodiments, 5′ and 3′ terminal regions comprise from about 9 nucleic acids to about 90 nucleic acids, from about 15 nucleic acids to about 120 nucleic acids, from about 30 nucleic acids to about 150 nucleic acids, from about 60 nucleic acids to about 300 nucleic acids and/or at least 300 nucleic acids. In some embodiments, 5′ regions may comprise any length of nucleic acids that includes the 5′ terminus, but does not include the 3′ terminus. In some embodiments, 3′ regions may comprise any length of nucleic acids, which include the 3′ terminus, but does not comprise the 5′ terminus.

[0415] RNA or RNA molecule: As used herein, the term “RNA” or “RNA molecule” or “ribonucleic acid molecule” refers to a polymer of ribonucleotides; the term “DNA” or “DNA molecule” or “deoxyribonucleic acid molecule” refers to a polymer of deoxyribonucleotides. DNA and RNA can be synthesized naturally, e.g., by DNA replication and transcription of DNA, respectively; or be chemically synthesized. DNA and RNA can be single-stranded (i.e., ssRNA or ssDNA, respectively) or multi-stranded (e.g., double stranded, i.e., dsRNA and dsDNA, respectively). The term “mRNA” or “messenger RNA”, as used herein, refers to a single stranded RNA that encodes the amino acid sequence of one or more polypeptide chains.

[0416] RNA interference: As used herein, the term “RNA interference” or “RNAi” refers to a sequence specific regulatory mechanism mediated by RNA molecules which results in the inhibition or interference or “silencing” of the expression of a corresponding protein-coding gene.

[0417] Sample: As used herein, the term “sample” refers to an aliquot or portion taken from a source and/or provided for analysis or processing. In some embodiments, a sample is from a biological source such as a tissue, cell or component part (e.g. a body fluid, including but not limited to blood, mucus, lymphatic fluid, synovial fluid, cerebrospinal fluid, saliva, amniotic fluid, amniotic cord blood, urine, vaginal fluid and semen). In some embodiments, a sample may be or comprise a homogenate, lysate or extract prepared from a whole organism or a subset of its tissues, cells or component parts, or a fraction or portion thereof, including but not limited to, for example, plasma, serum, spinal fluid, lymph fluid, the external sections of the skin, respiratory, intestinal, and genitourinary tracts, tears, saliva, milk, blood cells, tumors, organs. In some embodiments, a sample is or comprises a medium, such as a nutrient broth or gel, which may contain cellular components, such as proteins or nucleic acid molecule. In some embodiments, a “primary” sample is an aliquot of the source. In some embodiments, a primary sample is subjected to one or more processing (e.g., separation, purification, etc.) steps to prepare a sample for analysis or other use.

[0418] Self-complementary viral particle: As used herein, a “self-complementary viral particle” is a particle comprised of at least two components, a protein capsid and a polynucleotide sequence encoding a self-complementary genome enclosed within the capsid.

[0419] Sense strand: As used herein, the term “the sense strand” or “the second strand” or “the passenger strand” of a siRNA molecule refers to a strand that is complementary to the antisense strand or first strand. The antisense and sense strands of a siRNA molecule are hybridized to form a duplex structure. As used herein, a “siRNA duplex” includes a siRNA strand having sufficient complementarity to a section of about 10-50 nucleotides of the mRNA of the gene targeted for silencing and a siRNA strand having sufficient complementarity to form a duplex with the siRNA strand.

[0420] Signal Sequences: As used herein, the phrase “signal sequences” refers to a sequence which can direct the transport or localization.

[0421] Single unit dose: As used herein, a “single unit dose” is a dose of any therapeutic administered in one dose/at one time/single route/single point of contact, i.e., single administration event. In some embodiments, a single unit dose is provided as a discrete dosage form (e.g., a tablet, capsule, patch, loaded syringe, vial, etc.).

[0422] Similarity: As used herein, the term “similarity” refers to the overall relatedness between polymeric molecules, e.g. between polynucleotide molecules (e.g. DNA molecules and/or RNA molecules) and/or between polypeptide molecules. Calculation of percent similarity of polymeric molecules to one another can be performed in the same manner as a calculation of percent identity, except that calculation of percent similarity takes into account conservative substitutions as is understood in the art.

[0423] Small/short interfering RNA: As used herein, the term “small/short interfering RNA” or “siRNA” refers to an RNA molecule (or RNA analog) comprising between about 5-60 nucleotides (or nucleotide analogs) which is capable of directing or mediating RNAi. Preferably, a siRNA molecule comprises between about 15-30 nucleotides or nucleotide analogs, more preferably between about 16-25 nucleotides (or nucleotide analogs), even more preferably between about 18-23 nucleotides (or nucleotide analogs), and even more preferably between about 19-22 nucleotides (or nucleotide analogs) (e.g., 19, 20, 21 or 22 nucleotides or nucleotide analogs). The term “short” siRNA refers to a siRNA comprising 5-23 nucleotides, preferably 21 nucleotides (or nucleotide analogs), for example, 19, 20, 21 or 22 nucleotides. The term “long” siRNA refers to a siRNA comprising 24-60 nucleotides, preferably about 24-25 nucleotides, for example, 23, 24, 25 or 26 nucleotides. Short siRNAs may, in some instances, include fewer than 19 nucleotides, e.g., 16, 17 or 18 nucleotides, or as few as 5 nucleotides, provided that the shorter siRNA retains the ability to mediate RNAi. Likewise, long siRNAs may, in some instances, include more than 26 nucleotides, e.g., 27, 28, 29, 30, 35, 40, 45, 50, 55, or even 60 nucleotides, provided that the longer siRNA retains the ability to mediate RNAi or translational repression absent further processing, e.g., enzymatic processing, to a short siRNA. siRNAs can be single stranded RNA molecules (ss-siRNAs) or double stranded RNA molecules (ds-siRNAs) comprising a sense strand and an antisense strand which hybridized to form a duplex structure called siRNA duplex.

[0424] Split dose: As used herein, a “split dose” is the division of single unit dose or total daily dose into two or more doses.

[0425] Stable: As used herein “stable” refers to a compound or entity that is sufficiently robust to survive isolation to a useful degree of purity from a reaction mixture, and preferably capable of formulation into an efficacious therapeutic agent.

[0426] Stabilized: As used herein, the term “stabilize”, “stabilized,” “stabilized region” means to make or become stable. In some embodiments, stability is measured relative to an absolute value. In some embodiments, stability is measured relative to a reference compound or entity.

[0427] Subject: As used herein, the term “subject” or “patient” refers to any organism to which a composition in accordance with the disclosure may be administered, e.g., for experimental, diagnostic, prophylactic, and/or therapeutic purposes. Typical subjects include animals (e.g., mammals such as mice, rats, rabbits, non-human primates, and humans) and/or plants. In some embodiments, the subject may be an infant, neonate, or a child under the age of 12 years old. In some embodiments, the subject may be in utero.

[0428] Substantially: As used herein, the term “substantially” refers to the qualitative condition of exhibiting total or near-total extent or degree of a characteristic or property of interest. One of ordinary skill in the biological arts will understand that biological and chemical phenomena rarely, if ever, go to completion and/or proceed to completeness or achieve or avoid an absolute result. The term “substantially” is therefore used herein to capture the potential lack of completeness inherent in many biological and chemical phenomena.

[0429] Substantially equal: As used herein as it relates to time differences between doses, the term means plus/minus 2%.

[0430] Substantially simultaneously: As used herein and as it relates to plurality of doses, the term typically means within about 2 seconds.

[0431] Suffering from: An individual who is “suffering from” a disease, disorder, and/or condition has been diagnosed with or displays one or more symptoms of a disease, disorder, and/or condition.

[0432] Susceptible to: An individual who is “susceptible to” a disease, disorder, and/or condition has not been diagnosed with and/or may not exhibit symptoms of the disease, disorder, and/or condition but harbors a propensity to develop a disease or its symptoms. In some embodiments, an individual who is susceptible to a disease, disorder, and/or condition (for example, cancer) may be characterized by one or more of the following: (1) a genetic mutation associated with development of the disease, disorder, and/or condition; (2) a genetic polymorphism associated with development of the disease, disorder, and/or condition; (3) increased and/or decreased expression and/or activity of a protein and/or nucleic acid associated with the disease, disorder, and/or condition; (4) habits and/or lifestyles associated with development of the disease, disorder, and/or condition; (5) a family history of the disease, disorder, and/or condition; and (6) exposure to and/or infection with a microbe associated with development of the disease, disorder, and/or condition. In some embodiments, an individual who is susceptible to a disease, disorder, and/or condition will develop the disease, disorder, and/or condition. In some embodiments, an individual who is susceptible to a disease, disorder, and/or condition will not develop the disease, disorder, and/or condition.

[0433] Synthetic: The term “synthetic” means produced, prepared, and/or manufactured by the hand of man. Synthesis of polynucleotides or polypeptides or other molecules of the present disclosure may be chemical or enzymatic.

[0434] Targeting: As used herein, “targeting” means the process of design and selection of nucleic acid sequence that will hybridize to a target nucleic acid and induce a desired effect.

[0435] Targeted Cells: As used herein, “targeted cells” refers to any one or more cells of interest. The cells may be found in vitro, in vivo, in situ or in the tissue or organ of an organism. The organism may be an animal, preferably a mammal, more preferably a human and most preferably a patient.

[0436] Therapeutic Agent: The term “therapeutic agent” refers to any agent that, when administered to a subject has a therapeutic, diagnostic, and/or prophylactic effect and/or elicits a desired biological and/or pharmacological effect.

[0437] Therapeutically effective amount: As used herein, the term “therapeutically effective amount” means an amount of an agent to be delivered (e.g., nucleic acid, drug, therapeutic agent, diagnostic agent, prophylactic agent, etc.) that is sufficient, when administered to a subject suffering from or susceptible to an infection, disease, disorder, and/or condition, to treat, improve symptoms of, diagnose, prevent, and/or delay the onset of the infection, disease, disorder, and/or condition. In some embodiments, a therapeutically effective amount is provided in a single dose. In some embodiments, a therapeutically effective amount is administered in a dosage regimen comprising a plurality of doses. Those skilled in the art will appreciate that in some embodiments, a unit dosage form may be considered to comprise a therapeutically effective amount of a particular agent or entity if it comprises an amount that is effective when administered as part of such a dosage regimen.

[0438] Therapeutically effective outcome: As used herein, the term “therapeutically effective outcome” means an outcome that is sufficient in a subject suffering from or susceptible to an infection, disease, disorder, and/or condition, to treat, improve symptoms of, diagnose, prevent, and/or delay the onset of the infection, disease, disorder, and/or condition.

[0439] Total daily dose: As used herein, a “total daily dose” is an amount given or prescribed in a 24 hr period. It may be administered as a single unit dose.

[0440] Treating: As used herein, the term “treating” refers to partially or completely alleviating, ameliorating, improving, relieving, delaying onset of, inhibiting progression of, reducing severity of, and/or reducing incidence of one or more symptoms or features of a particular infection, disease, disorder, and/or condition. For example, “treating” cancer may refer to inhibiting survival, growth, and/or spread of a tumor. Treatment may be administered to a subject who does not exhibit signs of a disease, disorder, and/or condition and/or to a subject who exhibits only early signs of a disease, disorder, and/or condition for the purpose of decreasing the risk of developing pathology associated with the disease, disorder, and/or condition.

[0441] Unmodified: As used herein, “unmodified” refers to any substance, compound or molecule prior to being changed in any way. Unmodified may, but does not always, refer to the wild-type or native form of a biomolecule or entity. Molecules or entities may undergo a series of modifications whereby each modified product may serve as the “unmodified” starting molecule or entity for a subsequent modification.

[0442] Vector: As used herein, a “vector” is any molecule or moiety which transports, transduces or otherwise acts as a carrier of a heterologous molecule.

[0443] Vectors of the present disclosure may be produced recombinantly and may be based on and/or may comprise adeno-associated virus (AAV) parent or reference sequence. Such parent or reference AAV sequences may serve as an original, second, third or subsequent sequence for engineering vectors. In non-limiting examples, such parent or reference AAV sequences may comprise any one or more of the following sequences: a polynucleotide sequence encoding a polypeptide or multi-polypeptide, which sequence may be wild-type or modified from wild-type and which sequence may encode full-length or partial sequence of a protein, protein domain, or one or more subunits of a protein; a polynucleotide comprising a modulatory or regulatory nucleic acid which sequence may be wild-type or modified from wild-type; and a transgene that may or may not be modified from wild-type sequence. These AAV sequences may serve as either the “donor” sequence of one or more codons (at the nucleic acid level) or amino acids (at the polypeptide level) or “acceptor” sequences of one or more codons (at the nucleic acid level) or amino acids (at the polypeptide level).

[0444] Viral construct vector: As used herein, a “viral construct vector” is a vector which comprises one or more polynucleotide regions encoding or comprising Rep and or Cap protein.

[0445] Viral construct expression vector: As used herein, a “viral construct expression vector” is a vector which comprises one or more polynucleotide regions encoding or comprising Rep and or Cap that further comprises one or more polynucleotide regions encoding or comprising components for viral expression in a viral replication cell.

[0446] Viral genome: As used herein, a “viral genome” is a polynucleotide encoding at least one inverted terminal repeat (ITR), at least one regulatory sequence, and at least one payload. The viral genome is derived by replication of a payload construct from the payload construct expression vector. A viral genome encodes at least one copy of the payload construct.

### EQUIVALENTS AND SCOPE

[0447] Those skilled in the art will recognize, or be able to ascertain using no more than routine experimentation, many equivalents to the specific embodiments in accordance with those explicitly described herein. The scope of the present disclosure is not intended to be limited to the above Description, but rather is as set forth in the appended claims.

[0448] In the claims, articles such as “a,” “an,” and “the” may mean one or more than one unless indicated to the contrary or otherwise evident from the context. Claims or descriptions that include “or” between one or more members of a group are considered satisfied if one, more than one, or all of the group members are present in, employed in, or otherwise relevant to a given product or process unless indicated to the contrary or otherwise evident from the context. The disclosure includes embodiments in which exactly one member of the group is present in, employed in, or otherwise relevant to a given product or process. The disclosure includes embodiments in which more than one, or the entire group members are present in, employed in, or otherwise relevant to a given product or process.

[0449] The term “comprising” is intended to be open and permits but does not require the inclusion of additional elements or steps. When the term “comprising” is used herein, the term “consisting of” is thus also encompassed and disclosed.

[0450] Unless otherwise defined, all technical and scientific terms used herein have the same meaning as commonly understood by one of ordinary skill in the art to which this disclosure belongs. Methods and materials are described herein for use in the present disclosure; other, suitable methods and materials known in the art can also be used.

[0451] Where ranges are given, endpoints are included. Furthermore, it is to be understood that unless otherwise indicated or otherwise evident from the context and understanding of one of ordinary skill in the art, values that are expressed as ranges can assume any specific value or subrange within the stated ranges in different embodiments of the disclosure, to the tenth of the unit of the lower limit of the range, unless the context clearly dictates otherwise.

[0452] In addition, it is to be understood that any particular embodiment of the present disclosure that falls within the prior art may be explicitly excluded from any one or more of the claims. Since such embodiments are deemed to be known to one of ordinary skill in the art, they may be excluded even if the exclusion is not set forth explicitly herein. Any particular embodiment of the compositions of the disclosure (e.g., any nucleic acid or protein encoded thereby; any method of production; any method of use; etc.) can be excluded from any one or more claims, for any reason, whether or not related to the existence of prior art.

[0453] It is to be understood that the words which have been used are words of description rather than limitation, and that changes may be made within the purview of the appended claims without departing from the true scope and spirit of the disclosure in its broader aspects.

[0454] While the present disclosure has been described at some length and with some particularity with respect to the several described embodiments, it is not intended that it should be limited to any such particulars or embodiments or any particular embodiment, but it is to be construed with references to the appended claims so as to provide the broadest possible interpretation of such claims in view of the prior art and, therefore, to effectively encompass the intended scope of the disclosure. Section and table headings are not intended to be limiting.

[0455] All cited sources, for example, references, publications, databases, database entries, and art cited herein, are incorporated into this application by reference, even if not expressly stated in the citation. In case of conflicting statements of a cited source and the instant application, the statement in the instant application shall control.

### Examples

### Example 1. Design of AADC Polynucleotides

[0456] AADC polynucleotides are designed to comprise at a minimum a nucleic acid sequence encoding an AADC protein.

[0457] Once designed, the sequence is engineered or synthesized or inserted in a plasmid or vector and administered to a cell or organism. Suitable plasmids or vectors are any which transduce or transfect the target cell.

[0458] Adeno-associated viral vectors (AAV), viral particles or entire viruses may be used.

[0459] Administration results in the processing of the AADC polynucleotide to generate the AADC protein which alters the etiology of the disease being treated or ameliorated.

[0460] In one non-limiting example, plasmids containing an AADC polynucleotide of the disclosure are given in Table 2. These AADC polynucleotides in the table are contained in a Fastback plasmid and have a CMV promoter and encode AADC. In some embodiments the open reading frame of the AADC protein mRNA is codon optimized (e.g., codop).

TABLE 2
AADC polynucleotide containing plasmids/vectors.

| Construct | SEQ ID NO |
|---|---|
| pFB CMV hAADC-1 | 2 |
| pFB CMV hAADC-2 | 3 |
| pFB CMV hAADC-3 | 4 |
| pFB CMV hAADC-4 | 5 |
| phAADC_1k | 6 |
| phAADC_2k | 7 |
| phAADC_3k | 8 |
| phAADC_4 | 9 |
| phAADC_5k | 10 |
| phAADC_6k | 11 |
| phAADC_9k | 12 |

### Example 2. AADC Polynucleotides: ITR to ITR

[0461] AADC polynucleotides suitable for use in an AAV viral vector include those in Table 3.

[0462] Table 3 provides the ITR to ITR sequences from Table 2.

TABLE 3
ITR to ITR AADC polynucleotides

| Construct | SEQ ID NO |
|---|---|
| pFB CMV hAADC-1 (ITR to ITR) | 13 |
| pFB CMV hAADC-2 (ITR to ITR) | 14 |
| pFB CMV hAADC-3 (ITR to ITR) | 15 |
| pFB CMV hAADC-4 (ITR to ITR) | 16 |
| phAADC_1k (ITR to ITR) | 17 |
| phAADC_2k (ITR to ITR) | 18 |
| phAADC_3k (ITR to ITR) | 19 |
| phAADC_4 (ITR to ITR) | 20 |
| phAADC_5k (ITR to ITR) | 21 |
| phAADC_6k (ITR to ITR) | 22 |
| phAADC_9k (ITR to ITR) | 23 |

### Example 3. Relative to the ITR to ITR Parent Sequence

[0463] AADC polynucleotides are designed according to Tables 4-6. The start and stop positions given are relative to the ITR to ITR AADC polynucleotides described in Table 3. In Tables 4-6 “--” means the component is not applicable.

TABLE 4
Component modules or sequence
regions of AADC polynucleotides

| | pFB CMV | | pFB CMV | | pFB CMV | | pFB CMV | |
|---|---|---|---|---|---|---|---|---|
| | hAADC-1 | | hAADC-2 | | hAADC-3 | | hAADC-4 | |
| | (ITR to ITR) | | (ITR to ITR) | | (ITR to ITR) | | (ITR to ITR) | |
| | Start | Stop | Start | Stop | Start | Stop | Start | Stop |
| 5′ ITR | 1 | 130 | 1 | 130 | 1 | 130 | 1 | 130 |
| CMV Enhancer | 263 | 566 | 263 | 566 | 263 | 566 | 296 | 599 |
| CMV Promoter | 567 | 769 | 567 | 769 | 567 | 769 | 600 | 802 |
| ie1 exon 1 | 784 | 917 | 784 | 917 | 784 | 917 | 817 | 950 |
| ie1 intron1 | 918 | 949 | 918 | 949 | 918 | 949 | 951 | 982 |
| hBglobin | 950 | 1296 | 950 | 1296 | 950 | 1296 | 983 | 1329 |
| intron2 | | | | | | | | |
| hBglobin | 1297 | 1349 | 1297 | 1349 | 1297 | 1349 | 1330 | 1382 |
| exon 3 | | | | | | | | |
| 5′ UTR | — | — | — | — | — | — | 1398 | 1468 |
| hAADC | 1374 | 2822 | — | — | 1374 | 2822 | 1473 | 2921 |
| hAADC codop | — | — | 1374 | 2816 | — | — | — | — |
| 3′ UTR | — | — | — | — | 2823 | 3221 | 2922 | 3361 |
| hGH poly(A) | 2841 | 3317 | 2835 | 3311 | 3240 | 3716 | 3380 | 3856 |
| signal | | | | | | | | |
| 3′ ITR | 3417 | 3535 | 3416 | 3534 | 3822 | 3940 | 3961 | 4079 |

TABLE 5
Component modules or sequence
regions of AADC polynucleotides

| | hAADC_1k | | hAADC_2k | | hAADC_3k | | hAADC_4 | |
|---|---|---|---|---|---|---|---|---|
| | Start | Stop | Start | Stop | Start | Stop | Start | Stop |
| 5′ ITR | 1 | 141 | 1 | 141 | 1 | 141 | 1 | 141 |
| CMV Enhancer | 245 | 548 | 245 | 548 | 245 | 548 | 245 | 548 |
| CMV Promoter | 549 | 751 | 549 | 751 | 549 | 751 | 549 | 751 |
| ie1 exon 1 | 766 | 899 | 766 | 899 | 766 | 899 | 766 | 899 |
| ie1 intron1 | 900 | 931 | 900 | 931 | 900 | 931 | 900 | 931 |
| hBglobin | 932 | 1278 | 932 | 1278 | 932 | 1278 | 932 | 1278 |
| intron2 | | | | | | | | |
| hBglobin | 1279 | 1331 | 1279 | 1331 | 1279 | 1331 | 1279 | 1331 |
| exon 3 | | | | | | | | |
| 5′ UTR | — | — | — | — | — | — | 1347 | 3310 |
| hAADC | 1356 | 2804 | 1356 | 2804 | — | — | 1422 | 2864 |
| hAADC codop | — | — | — | — | 1356 | 2798 | — | — |
| 3′ UTR | — | — | — | — | — | — | 2865 | 3310 |
| hGH poly(A) | 2823 | 3299 | 2823 | 3299 | 2817 | 3293 | 3329 | 3805 |
| signal | | | | | | | | |
| 3′ ITR | 3357 | 3497 | 3357 | 3497 | 3351 | 3491 | 3863 | 4003 |

TABLE 6
Component modules or sequence
regions of AADC polynucleotides

| | hAADC_5k | | hAADC_6k | | hAADC_9k | |
|---|---|---|---|---|---|---|
| | Start | Stop | Start | Stop | Start | Stop |
| 5′ ITR | 1 | 145 | 1 | 141 | 1 | 130 |
| CMV Enhancer | 249 | 552 | 245 | 548 | 234 | 537 |
| CMV Promoter | 553 | 755 | 549 | 751 | 538 | 740 |
| ie1 exon 1 | 770 | 903 | 766 | 899 | 755 | 888 |
| ie1 intron1 | 904 | 935 | 900 | 931 | 889 | 920 |
| hBglobin intron2 | 936 | 1282 | 932 | 1278 | 921 | 1267 |
| hBglobin exon 3 | 1283 | 1335 | 1279 | 1331 | 1268 | 1320 |
| 5′ UTR | — | — | — | — | — | — |
| hAADC | | | 1356 | 2798 | 1345 | 2793 |
| hAADC codop | 1360 | 2802 | — | — | — | — |
| 3′ UTR | — | — | 2799 | 3203 | — | — |
| hGH poly(A) signal | 2821 | 3297 | 3222 | 3698 | 2812 | 3288 |
| 3′ ITR | 3355 | 3499 | 3756 | 3896 | 3346 | 3475 |

### Example 4. AADCD Patient Identification

[0464] The present disclosure is directed to the treatment, prophylaxis, palliation and/or amelioration of AADCD and related genetic inborn errors of metabolism in an affected pediatric population. Because AADCD presents in infancy and very early childhood, the presently described method employing AAV-mediated gene therapy is particularly useful. Firstly, the BBB may not yet be fully “closed” in the young brain, and secondly, neonates and infants are likely to be seronegative for AAV antigens and/or neutralizing antibodies that would otherwise impede transduction and successful gene therapy.

[0465] For the studies described herein, a population of AADC-deficient subjects is identified. In some embodiments, the AADC-deficient subjects are rodent models for AADCD. In some embodiments, the AADC-deficient subjects are non-human primates. In some embodiments a population of AADC-deficient human pediatric patients is identified.

[0466] The diagnosis of AADCD is made through detailed clinical assessment, analysis of cerebrospinal fluid neurotransmitters, and further supportive diagnostic investigations. In AADCD, the CSF neurotransmitter profile and other observations include: Low HVA, 5-HIAA, 3-methoxy-4-hydroxyphenylglycol with raised 5-HTP, L-DOPA, and 3-ortho-methyldopa; AADC enzyme activity in plasma is very low or absent; urinary catecholamines raised (vanillactic acid, 3-orthomethyldopa) (Ng, et al., 2014, Pediatr. Drugs (2014) 16:275-291).

[0467] By way of non-limiting example, appropriate subjects for this study are male and female subjects (age range, 3 months to twelve years of age). Before the gene transfer, all of the patients are likely bedridden, and none have head control or are able to talk; they experience oculogyric crises every 2 to 3 days, and these attacks last for hours and consist of eye deviations, dystonia, irritability, hypersalivation, and biting of the tongue and lips; the patients cry in response to minimal stimulation and may display excessive sweating and unstable body temperature; additionally, they choke and regurgitate during feeding and are all underweight, if not emaciated. AADC gene mutations are identified in all patients. Several subjects bear the common IVS6+4A>T mutation, and others, the c.1297_1298insA mutation. Brain magnetic resonance imaging (MM) reveal normal brain structures, intact striatum, and normal myelination. The only abnormal finding may be mild cortical atrophy. The lack of structural brain anomalies in these patients is in marked contrast to their severe physical limitations, therefore making them ideal candidates for this new treatment approach. Patients are followed for more than two years after gene transfer (See Brun et al., 2010, Neurology, 75(1):64-71; Hwu, W. L., et al., 2012. Gene therapy for aromatic L-amino acid decarboxylase deficiency. Sci. Transl. Med. Vol. 4, 134ra61).

[0468] For example, a 24-week study is designed to evaluate the safety and tolerability of infusion of the herein disclosed AADC polynucleotide-containing recombinant adeno-associated virus (AAV) vector compositions in human patients diagnosed with AADCD. Patients are evaluated preoperatively and monthly postoperatively for six months, using multiple measures, including the Global Systonia Scale (GDS) (see Comella, et al., 2003, Movement Disorders, 18(3):303-312), motor state diaries, and laboratory tests. Using diaries that separate the day into half-hour segments, the caregivers of the patients will record their mobility during the four days before admission and for another four days at six months after admission to the study site. The patient caregivers are trained to rate subject's condition as sleeping, immobile, mobile without troublesome dyskinesias, or mobile with troublesome dyskinesias. The total number of hours spent in each of these categories is calculated, and the differences between the baseline and the six-month scores are compared between the groups. The short-duration response to levodopa is evaluated at baseline and 6 months after gene transfer; subjects take 100 mg of levodopa orally with 25 mg benserazide after 20 hours without dopaminergic medication. Motor symptoms based on GDS and plasma levodopa concentrations are assessed at baseline and 30 minutes, 1,2,3, and 4 hours after levodopa intake (See, for example, Muramatsu, et al., 2010, “A phase I study of aromatic L-amino acid decarboxylase gene therapy for Parkinson's disease.” Mol. Ther. 18:1731-1735).

### Example 5. Administration of AADC Polynucleotide Compositions to Patients for Gene Therapy

[0469] AADC polynucleotide-containing recombinant AAV vector compositions are infused into the substantia nigra, and in particular, the substantia nigra pars compacta (SNpc) and ventral tegmental area (VTA) of patients having AADCD and identified as qualified for treatment according to the parameters set forth in Example 4.

[0470] One method of administration contemplated for use in the methods described herein is real-time convection-enhanced delivery (RCD) of AADC polynucleotide-containing AAV vector compositions by co-infusion of gadoteridol (a magnetic resonance (MR) contrast agent) and T1 or T2 magnetic resonance imaging (MM), which can predict areas of subsequent AADC gene expression. As described in Richardson, et al., 2011, the accuracy of cannula placement and initial infusate distribution may be safely determined by saline infusion without significantly altering the subsequent distribution of the tracer agent (Richardson, et al., 2011, Neurosurgery, 69(1):154-163). T2 RCD provides detection of intraparenchymal convection-enhanced delivery in the uninjured brain and may predict subsequent distribution of a transgene after viral vector infusion. Subjects undergo saline infusion/T2 acquisition, immediately followed by gadoteridol infusion/T1 acquisition in the putamen and brainstem. Distribution volumes and spatial patterns are analyzed. Gadoteridol and AAV-encoded AADC are co-infused under alternating T2/T1 acquisition in the thalamus, and hyperintense areas are compared with areas of subsequent transgene expression. Ratios of distribution volume to infusion volume are expected to be similar between saline and gadoteridol RCD. Spatial overlap should correlate well between T2 and T1 images. The second infusate will follow a spatiotemporal pattern similar to that of the first, filling the target area before developing extra-target distribution. Areas of AADC expression should correlate well with areas of both T1 and T2 hyperintensity observed during RCD (Richardson, et al., 2011, Neurosurgery, 69(1):154-163).

[0471] Convection-enhanced delivery (CED) of macromolecules directly into the brain parenchyma has been known for over two decades. CED is a term that denotes the use of a pressure gradient to generate bulk flow within the brain parenchyma, i.e. convection of macromolecules within the interstitial fluid driven by infusing a solution through a cannula placed directly in the targeted structure. This method allows therapeutic agents to be homogenously distributed through large volumes of brain tissue by bypassing the blood brain barrier and surpassing simple diffusion (Richardson, et al., 2011, Stereotact. Funct. Neurosurg. 89:141-151).

[0472] Salegio, et al. recently demonstrated the distribution of nanoparticles of different sizes, including micelles (˜15 nm in size), AAV (˜20-25 nm) and liposomes (˜65 nm), within the CNS of rodents and NHPs (Salegio et al., 2014, Frontiers in Neuroanatomy, vol. 8, article 9: pp. 1-8). Simple injections cannot engage the perivascular system, and specialized infusion cannulae are required, enabling constant pressures to be exerted at the tip of the cannula such that the interstitial hydrostatic pressure is exceeded and infusate can flow out into the tissue. Simple needles generate significant reflux; thus, reflux-resistant cannulas have been developed to counter this tendency. The advent of platforms for MM-guided convection-enhanced infusions further refined understanding of the mechanics of perivascular flow, and it was demonstrated that perivascular distribution of liposomes was linear with respect to time, the slope of the curve was increased in myelinated regions, and cessation of infusion prevented further expansion in the volume of distribution. (Richardson, et al., 2011, Stereotact. Funct. Neurosurg. 89:141-151; Salegio et al., 2014, Frontiers in Neuroanatomy, vol. 8, article 9: pp. 1-8).

[0473] Intraparenchymal rAAV injections are known to result in robust but relatively local transduction. Such local delivery methods are advantageous when attempting gene therapy for neurological disorders that result from neuropathology that is localized to a specific anatomical region or anatomical circuitry such as in the case of Parkinson's disease. However, in treatments requiring more widespread CNS transduction, intraparenchymal injections are impractical. Treatment of neurological disorders attributable to inborn errors of metabolism and/or single-gene defects, or those that affect motor neurons of the spinal cord can require transduction of large proportions of the brain or spinal cord, respectively. Development of less invasive trans-BBB delivery methods for vectors is an extremely important endeavor. Numerous attempts to use molecules that are known to interact with various active transport mechanisms (probably receptor-mediated) to convey proteins across the BBB have been reported with varying results. Given the large number of AAV serotypes available, one or more serotypes may bind a cell-entry receptor capable of transporting the AAV capsid across the BBB (Manfredsson, et al., 2009, “AAV9: a potential blood-brain barrier buster.” Molecular Therapy 17(3):403-405).

[0474] Vector and Stereotaxic Infusion

[0475] A stereotactic approach may be used to surgically deliver the AAV-AADC vector. Although individuals with AADC deficiency lack epinephrine and norepinephrine, these patients should maintain stable blood pressure and heart rates during the surgery. There should be no notable intracerebral hemorrhages in the postoperative computed tomography (CT) or MRI scans. The needle tracts, as shown on the MM scans, should show accurate injection into the substantia nigra pars compacta (SNpc) and ventral tegmental area (VTA). The patients will be discharged from the hospital about one week after the surgery (Hwu, W. L., et al., 2012. Gene therapy for aromatic L-amino acid decarboxylase deficiency. Sci. Transl. Med. Vol. 4, 134ra61).

[0476] Subjects of treatment receive the AAV-vector composition vector, safely delivered to substantia nigra pars compacta (SNpc) and ventral tegmental area (VTA) via bilateral infusions, or alternatively, intrastriatally (into the caudate nucleus and putamen), or into the subthalamic nucleus (STN), for example optionally using the FDA-approved SmartFlow neuroventricular cannula (SurgiVision, Inc.) specifically designed for clinical application, with or without the aid of the ClearPoint system to help treating neurosurgeon(s) target and observe the delivery of the therapeutic agent in the brain (See, for example, San Sebastian, et al., 2014, Mol. Ther. Methods Clin. Dev. 3: 14049; See, for example, Feng and Maguire-Zeiss, 2010, CNS Drugs 24(3):177-192).

[0477] For example, during the surgery, two target points are determined in the substantia nigra pars compacta (SNpc) and ventral tegmental area (VTA) that are sufficiently separated from each other in dorsolateral directions and identified on a magnetic resonance image. One burr hole is trepanned in each side of the cranial bone, through which the vector is injected into the two target points via the two-track insertion route. The AAV-vector-containing solution is prepared to a concentration of 1.5×10¹² vector genome/ml, and 50 μl per point of the solution is injected at 1 μl/min; each patient receives 3×10¹¹ vector genome the AAV-vector construct.

[0478] Neutralizing antibody titers against AAV2 are determined by measuring β-galactosidase activities in HEK293 cells transduced with 5×10³ vector genome/cell of AAV2 vectors expressing β-galactosidase in various dilutions of sera.

### PET

[0479] The AADC expression level in the substantia nigra are assessed on PET imaging with FMT six days before surgery and at one- and six-months after gene transfer. All patients cease taking dopaminergic medications 18 hours before PET and take 2.5 mg/kg of carbidopa orally one hour before FMT injection. Subsequently, 0.12 mCi/kg of FMT in saline is infused into an antecubital vein, and a 90-minute dynamic acquisition sequence is obtained. The PET and magnetic resonance imaging data are co-registered with a fusion processing program (Syntegra; Philips, Amsterdam, The Netherlands) to produce the fusion images. Radioactivities within volumes of interest drawn in the nigrostriatal pathway are calculated between 80 and 90 minutes after tracer injection. A change in nigrostriatal pathway FMT uptake from baseline to 24 weeks is assessed using the substantia nigra to striatal ratio of radioactivities.

### Statistical Analysis

[0480] Values at baseline and 6 months after gene transfer are compared using Student's t-test (paired analyses). A two-sided P value <0.05 is taken to indicate significant differences. Two-way analysis of variance with Bonferroni correction of P values is used for the short-duration response to levodopa. (See, for example, Muramatsu, et al., 2010, “A phase I study of aromatic L-amino acid decarboxylase gene therapy for Parkinson's disease.” Mol. Ther. 18:1731-1735).

[0481] Safety and tolerability of bilateral administration of AAV-vector compositions using real-time image-guided infusion into the brains of AADCD subjects may be monitored for up to or after 9 months post-surgery. Broad coverage of targeted areas (substantia nigra pars compacta (SNpc) and ventral tegmental area (VTA) and widespread AADC protein distribution in the striatum should be achieved without inducing any adverse effects.

### Changes in Growth and Motor Skills:

[0482] The patients should gain weight and exhibit improvement in their motor scores after gene transfer, within a year, post-treatment. Weight will be measured at 3 to 6 months after gene transfer. All patients initially should have raw scores of zero on the Alberta Infant Motor Scale (AIMS) and very low raw scores for the Peabody Developmental Motor Scale, Second Edition (PDMS-II). After the gene transfer, all of the patients should show continuous increases in their raw scores on these two scales, which indicates that their motor functions have improved. The Comprehensive Developmental Inventory for Infants and Toddlers (CDIIT) covers both cognition and motor development. All of the patients should show low raw CDIIT scores before gene transfer, and the subsequent increase in scores demonstrate improvement in both motor and cognitive functions.

Subjective Improvements after Gene Transfer

[0483] To document the symptoms that are more difficult to quantify, parents of the patients are asked to fill out a questionnaire at the end of the study. The symptoms of the oculogyric crises should lessen, and eye deviations and sleep disruptions, for example, are some mild symptoms of the oculogyric crises that may remain after gene therapy. Subjects may experience increased emotional stability, and/or some improvements in sweating and hyperthermia (a common manifestation of body temperature instability in hot weather). There should be no detectable abnormality in heart rate variability as assessed by 24-hour Holter monitoring either before or after gene transfer. Before gene therapy, patients that were bedridden and showed little spontaneous movement may exhibit less severe ptosis (drooping of the upper eyelid) one to two weeks after the gene transfer. According to previous studies, dyskinesia may occur one month after gene transfer, but upon observation of a decrease in dyskinesia, motor development should start (Hwu, W. L., et al., 2012. Gene therapy for aromatic L-amino acid decarboxylase deficiency. Sci. Transl. Med. Vol. 4, 134ra61). Subjects may exhibit increased head control after three months, sitting with support after six to nine months, sitting up from the prone position after thirteen months, and holding toys and standing with support sixteen months after the gene transfer, for example. Anti-AAV2 antibodies should be negative in the patients before gene therapy, and the titers may increase slightly after gene transfer.

### PET Scans and CSF Analyses

[0484] PET scans and CSF analyses are completed for the treated patients. Six months after gene transfer, PET scans should reveal that uptake of 6-[18F] fluorodopa (FDOPA) increase from baseline in the combined (right and left) treatment sites. The CSF analysis should reveal increases in the levels of homovanillic acid (HVA, a metabolite of dopamine) and 5-hydroxyindoleacetic acid (HIAA, a metabolite of serotonin). However, the levels of L-DOPA and 3-O-methyldopa may remain elevated (Hwu, W. L., et al., 2012. Gene therapy for aromatic L-amino acid decarboxylase deficiency. Sci. Transl. Med. Vol. 4, 134ra61).

### Example 6. Administration of AADC Polynucleotides

[0485] AADC polynucleotide-containing recombinant AAV vector compositions are infused into the putamen of patients having AADCD and identified as qualified for treatment according to the parameters set forth in Example 4 using the administration methods described in Example 5. The dose, number of patients and volume are outlined in Table 7.

TABLE 7
Study Design

| | Number of | | |
|---|---|---|---|
| Study No. | Patients | Dose | Volume |
| 1 | 6 | 3 × 10¹¹ vg | 100 ul per putamen |
| 2 | 6 | 9 × 10¹¹ vg | 300 ul per putamen |
| 3 | 10 | 2.3 × 10¹¹ vg | 100 ul per putamen |
| 4 | 10 | 7.5 × 10¹¹ vg | 100 ul per putamen |
| 5 | 5 | 7.5 × 10¹¹ vg | 450 ul per putamen |
| 6 | Up to 20 | 1.4 × 10¹² vg | Up to 900 ul per putamen |
| 7 | Up to 20 | 4.8 × 10¹² vg | Up to 900 ul per putamen |
| 8 | Up to 20 | 8.8 × 10¹² vg | Up to 900 ul per putamen |

[0486] During the course of the study the safety and tolerability of the infusion of the AADC polynucleotide-containing recombinant adeno-associated virus (AAV) vector compositions in human patients diagnosed with AADCD is evaluated. Patients are evaluated preoperatively and monthly postoperatively for six months, using multiple measures, including the Global Systonia Scale (GDS) (see Comella, et al., 2003, Movement Disorders, 18(3):303-312), L-DOPA challenge test, UPDRS scores, motor state diaries, and laboratory tests. Using diaries that separate the day into half-hour segments, the caregivers of the patients will record their mobility during the four days before admission and for another four days at six months after admission to the study site. The patient caregivers are trained to rate subject's condition as sleeping, immobile, mobile without troublesome dyskinesias, or mobile with troublesome dyskinesias. The total number of hours spent in each of these categories is calculated, and the differences between the baseline and the six-month scores are compared between the groups. The short-duration response to levodopa is evaluated at baseline and 6 months after gene transfer; subjects take 100 mg of levodopa orally with 25 mg benserazide after 20 hours without dopaminergic medication. Motor symptoms based on GDS and plasma levodopa concentrations are assessed at baseline and 30 minutes, 1, 2, 3, and 4 hours after levodopa intake (See, for example, Muramatsu, et al., 2010, “A phase I study of aromatic L-amino acid decarboxylase gene therapy for Parkinson's disease.” Mol. Ther. 18:1731-1735).

### Example 7. In Vivo Administration of AADC Polynucleotides

[0487] Two AADC polynucleotide-containing recombinant AAV vector compositions (SEQ ID NO: 17 and 19), a control and a standard were administered to rats (n=5) by bilateral intrastriation (10 ul/side) at a dose level of 2×10¹² vg/ml. The expression of AADC in rat striatum was determined by ELISA after 4 and 8 weeks. Variation was seen between the animals and the hemispheres due to variable delivery between the infusion sites. Both SEQ ID NO: 10 and 12 expressed AADC, but SEQ ID NO: 12 showed up to 200% increase of expression as compared to the standard construct.

### Example 8. Dose Response Study of AADC Polynucleotides

[0488] Compositions of AADC polynucleotide-containing recombinant AAV vectors (SEQ ID NO: 17) at five different dose levels ranging from 1×10¹¹ vg/ml to 1×10¹³ vg/ml and a control are administered to 6-OHDA lesioned rats. The behavioral response to low-dose levodopa administration is quantified before and after (week 3 and 4) delivery of the composition. 5 weeks after dosing, necropsy is conducted and the AADC enzymatic activity is measured in ex vivo striatal tissue assay and the distribution of AADC in the brain is determined by immunohistochemical (IHC) staining.

### Example 9. Effect of Empty Particles on Intrastriatal Transduction

[0489] Adult rats (n=6) were administered varying ratios of full:empty vector particles at: 0% full, 50% full, 85% full or 99% full. AADC polynucleotide-containing recombinant AAV vector (SEQ ID NO: 10) at a constant dose and volume (5 ul and 1×10 vg) was administered intrastriatally. The rats were evaluated 4 weeks after administration. The low vector dose resulted in limited AADC vector expression. The volume of distribution for the particles is shown in Table 8 (ELISA) and the striatal levels of AADC expression is shown in Table 9 (Histology).

TABLE 8
Volume of Distribution

| % Ratio of full AAV2-AADC | Approximate Volume of |
|---|---|
| particle to empty capsids | Distribution (mm³) |
| 50:50 | 2 |
| 70:30 | 2.4 |
| 85:15 | 2.5 |
| 100:0 | 3 |

TABLE 9
Striatal Levels

| % full of AAV2-AADC particles | AADC pg/ug protein |
|---|---|
| 0 | 0.4 |
| 52 | 1.1 |
| 58 | 1.7 |
| 83 | 2 |
| >99 | 2.1 |

[0490] Distribution was comparable for all groups. Relatively low vector dose resulted in limited AADC expression. There was also a trend to lower AADC expression levels with >30% empty particles.

[0491] While the present disclosure has been described at some length and with some particularity with respect to the several described embodiments, it is not intended that it should be limited to any such particulars or embodiments or any particular embodiment, but it is to be construed with references to the appended claims so as to provide the broadest possible interpretation of such claims in view of the prior art and, therefore, to effectively encompass the intended scope of the disclosure.

[0492] All publications, patent applications, patents, and other references mentioned herein are incorporated by reference in their entirety. In case of conflict, the present specification, including definitions, will control. In addition, section headings, the materials, methods, and examples are illustrative only and not intended to be limiting.

The application's sequence listing, which the Patent Office published only in electronic form, follows.

SEQUENCE LISTING (899 sequences)

SEQ ID NO: 1 - protein, 480 aa, Homo sapiens
MNASEFRRRGKEMVDYVANYMEGIEGRQVYPDVEPGYLRPLIPAAAPQEPDTFEDIINDVEKIIMPGVTHWHSPYFFAYFPTASSYPAMLADMLCGAIGCIGFSWAASPACTELETVMMDWLGKMLELPKAFLNEKAGEGGGVIQGSASEATLVALLAARTKVIHRLQAASPELTQAAIMEKLVAYSSDQAHSSVERAGLIGGVKLKAIPSDGNFAMRASALQEALERDKAAGLIPFFMVATLGTTTCCSFDNLLEVGPICNKEDIWLHVDAAYAGSAFICPEFRHLLNGVEFADSFNFNPHKWLLVNFDCSAMWVKKRTDLTGAFRLDPTYLKHSHQDSGLITDYRHWQIPLGRRFRSLKMWFVFRMYGVKGLQAYIRKHVQLSHEFESLVRQDPRFEICVEVILGLVCFRLKGSNKVNEALLQRINSAKKIHLVPCHLRDKFVLRFAICSRTVESAHVQRAWEHIKELAADVLRAERE

SEQ ID NO: 2 - DNA, 8150 bp, Artificial Sequence
  Description of Artificial Sequence: Synthetic polynucleotide
cattcgccattcaggctgcaaataagcgttgatattcagtcaattacaaacattaataacgaagagatgacagaaaaattttcattctgtgacagagaaaaagtagccgaagatgacggtttgtcacatggagttggcaggatgtttgattaaaaacataacaggaagaaaaatgccccgctgtgggcggacaaaatagttgggaactgggaggggtggaaatggagtttttaaggattatttagggaagagtgacaaaatagatgggaactgggtgtagcgtcgtaagctaatacgaaaattaaaaatgacaaaatagtttggaactagatttcacttatctggttcggatctcctaggcgatatcagtgatcagatccagacatgataagatacattgatgagtttggacaaaccacaactagaatgcagtgaaaaaaatgctttatttgtgaaatttgtgatgctattgctttatttgtaaccattataagctgcaataaacaagttaacaacaacaattgcattcattttatgtttcaggttcagggggaggtgtgggaggttttttaaagcaagtaaaacctctacaaatgtggtatggctgattatgatcctctagtacttctcgacaagcttacattattgaagcatttatcagggttattgtctcagacctgcaggcagctgcgcgctcgctcgctcactgaggccgcccgggcaaagcccgggcgtcgggcgacctttggtcgcccggcctcagtgagcgagcgagcgcgcagagagggagtggccaactccatcactaggggttccttgtagttaatgattaacccgccatgctacttatctacgtagccatgctctagagcggccgcacgcgtggagctagttattaatagtaatcaattacggggtcattagttcatagcccatatatggagttccgcgttacataacttacggtaaatggcccgcctggctgaccgcccaacgacccccgcccattgacgtcaataatgacgtatgttcccatagtaacgtcaatagggactttccattgacgtcaatgggtggagtatttacggtaaactgcccacttggcagtacatcaagtgtatcatatgccaagtacgccccctattgacgtcaatgacggtaaatggcccgcctggcattatgcccagtacatgaccttatgggactttcctacttggcagtacatctacgtattagtcatcgctattaccatggtgatgcggttttggcagtacatcaatgggcgtggatagcggtttgactcacggggatttccaagtctccaccccattgacgtcaatgggagtttgttttgcaccaaaatcaacgggactttccaaaatgtcgtaacaactccgccccattgacgcaaatgggcggtaggcgtgtacggtgggaggtctatataagcagagctcgtttagtgaaccgtcagatcgcctggagacgccatccacgctgttttgacctccatagaagacaccgggaccgatccagcctccgcggattcgaatcccggccgggaacggtgcattggaacgcggattccccgtgccaagagtgacgtaagtaccgcctatagagtctataggcccacaaaaaatgctttcttcttttaatatacttttttgtttatcttatttctaatactttccctaatctctttctttcagggcaataatgatacaatgtatcatgcctctttgcaccattctaaagaataacagtgataatttctgggttaaggcaatagcaatatttctgcatataaatatttctgcatataaattgtaactgatgtaagaggtttcatattgctaatagcagctacaatccagctaccattctgcttttattttatggttgggataaggctggattattctgagtccaagctaggcccttttgctaatcatgttcatacctcttatcttcctcccacagctcctgggcaacgtgctggtctgtgtgctggcccatcactttggcaaagaattgggattcgaacatcggccgccaccatgaacgcaagtgaattccgaaggagagggaaggagatggtggattacgtggccaactacatggaaggcattgagggacgccaggtctaccctgacgtggagcccgggtacctgcggccgctgatccctgccgctgcccctcaggagccagacacgtttgaggacatcatcaacgacgttgagaagataatcatgcctggggtgacgcactggcacagcccctacttcttcgcctacttccccactgccagctcgtacccggccatgcttgcggacatgctgtgcggggccattggctgcatcggcttctcctgggcggcaagcccagcatgcacagagctggagactgtgatgatggactggctcgggaagatgctggaactaccaaaggcatttttgaatgagaaagctggagaagggggaggagtgatccagggaagtgccagtgaagccaccctggtggccctgctggccgctcggaccaaagtgatccatcggctgcaggcagcgtccccagagctcacacaggccgctatcatggagaagctggtggcttactcatccgatcaggcacactcctcagtggaaagagctgggttaattggtggagtgaaattaaaagccatcccctcagatggcaacttcgccatgcgtgcgtctgccctgcaggaagccctggagagagacaaagcggctggcctgattcctttctttatggttgccaccctggggaccacaacatgctgctcctttgacaatctcttagaagtcggtcctatctgcaacaaggaagacatatggctgcacgttgatgcagcctacgcaggcagtgcattcatctgccctgagttccggcaccttctgaatggagtggagtttgcagattcattcaactttaatccccacaaatggctattggtgaattttgactgttctgccatgtgggtgaaaaagagaacagacttaacgggagcctttagactggaccccacttacctgaagcacagccatcaggattcagggcttatcactgactaccggcattggcagataccactgggcagaagatttcgctctttgaaaatgtggtttgtatttaggatgtatggagtcaaaggactgcaggcttatatccgcaagcatgtccagctgtcccatgagtttgagtcactggtgcgccaggatccccgctttgaaatctgtgtggaagtcattctggggcttgtctgctttcggctaaagggttccaacaaagtgaatgaagctcttctgcaaagaataaacagtgccaaaaaaatccacttggttccatgtcacctcagggacaagtttgtcctgcgctttgccatctgttctcgcacggtggaatctgcccatgtgcagcgggcctgggaacacatcaaagagctggcggccgacgtgctgcgagcagagagggagtaggagtgagctgctcgagagatctacgggtggcatccctgtgacccctccccagtgcctctcctggccctggaagttgccactccagtgcccaccagccttgtcctaataaaattaagttgcatcattttgtctgactaggtgtccttctataatattatggggtggaggggggtggtatggagcaaggggcaagttgggaagacaacctgtagggcctgcggggtctattgggaaccaagctggagtgcagtggcacaatcttggctcactgcaatctccgcctcctgggttcaagcgattctcctgcctcagcctcccgagttgttgggattccaggcatgcatgaccaggctcagctaatttttgtttttttggtagagacggggtttcaccatattggccaggctggtctccaactcctaatctcaggtgatctacccaccttggcctcccaaattgctgggattacaggcgtgaaccactgctcccttccctgtccttctgattttgtaggtaaccccggaccacgtgcggaccgagcggccgctctagagcatggctacgtagataagtagcatggcgggttaatcattaactacaaggaacccctagtgatggagttggccactccctctctgcgcgctcgctcgctcactgaggccgggcgaccaaaggtcgcccgacgcccgggcggcctcagtgagcgagcgagcgcgcagctgcctgcaggtctgagacaataaccctgataaatgcttcaataatgtagccaaccactagaactatagctagagtcctgggcgaacaaacgatgctcgccttccagaaaaccgaggatgcgaaccacttcatccggggtcagcaccaccggcaagcgccgcgacggccgaggtcttccgatctcctgaagccagggcagatccgtgcacagcaccttgccgtagaagaacagcaaggccgccaatgcctgacgatgcgtggagaccgaaaccttgcgctcgttcgccagccaggacagaaatgcctcgacttcgctgctgcccaaggttgccgggtgacgcacaccgtggaaacggatgaaggcacgaacccagttgacataagcctgttcggttcgtaaactgtaatgcaagtagcgtatgcgctcacgcaactggtccagaaccttgaccgaacgcagcggtggtaacggcgcagtggcggttttcatggcttgttatgactgtttttttgtacagtctatgcctcgggcatccaagcagcaagcgcgttacgccgtgggtcgatgtttgatgttatggagcagcaacgatgttacgcagcagcaacgatgttacgcagcagggcagtcgccctaaaacaaagttaggtggctcaagtatgggcatcattcgcacatgtaggctcggccctgaccaagtcaaatccatgcgggctgctcttgatcttttcggtcgtgagttcggagacgtagccacctactcccaacatcagccggactccgattacctcgggaacttgctccgtagtaagacattcatcgcgcttgctgccttcgaccaagaagcggttgttggcgctctcgcggcttacgttctgcccaagtttgagcagccgcgtagtgagatctatatctatgatctcgcagtctccggcgagcaccggaggcagggcattgccaccgcgctcatcaatctcctcaagcatgaggccaacgcgcttggtgcttatgtgatctacgtgcaagcagattacggtgacgatcccgcagtggctctctatacaaagttgggcatacgggaagaagtgatgcactttgatatcgacccaagtaccgccacctaacaattcgttcaagccgagatcggcttcccggccgcggagttgttcggtaaattgtcacaacgccgcgaatatagtctttaccatgcccttggccacgcccctctttaatacgacgggcaatttgcacttcagaaaatgaagagtttgctttagccataacaaaagtccagtatgctttttcacagcataactggactgatttcagtttacaactattctgtctagtttaagactttattgtcatagtttagatctattttgttcagtttaagactttattgtccgcccacacccgcttacgcagggcatccatttattactcaaccgtaaccgattttgccaggttacgcggctggtctatgcggtgtgaaataccgcacagatgcgtaaggagaaaataccgcatcaggcgctcttccgcttcctcgctcactgactcgctgcgctcggtcgttcggctgcggcgagcggtatcagctcactcaaaggcggtaatacggttatccacagaatcaggggataacgcaggaaagaacatgtgagcaaaaggccagcaaaaggccaggaaccgtaaaaaggccgcgttgctggcgtttttccataggctccgcccccctgacgagcatcacaaaaatcgacgctcaagtcagaggtggcgaaacccgacaggactataaagataccaggcgtttccccctggaagctccctcgtgcgctctcctgttccgaccctgccgcttaccggatacctgtccgcctttctcccttcgggaagcgtggcgctttctcatagctcacgctgtaggtatctcagttcggtgtaggtcgttcgctccaagctgggctgtgtgcacgaaccccccgttcagcccgaccgctgcgccttatccggtaactatcgtcttgagtccaacccggtaagacacgacttatcgccactggcagcagccactggtaacaggattagcagagcgaggtatgtaggcggtgctacagagttcttgaagtggtggcctaactacggctacactagaagaacagtatttggtatctgcgctctgctgaagccagttaccttcggaaaaagagttggtagctcttgatccggcaaacaaaccaccgctggtagcggtggtttttttgtttgcaagcagcagattacgcgcagaaaaaaaggatctcaagaagatcctttgatcttttctacggggtctgacgctcagtggaacgaaaactcacgttaagggattttggtcatgagattatcaaaaaggatcttcacctagatccttttaaattaaaaatgaagttttaaatcaatctaaagtatatatgagtaaacttggtctgacagttaccaatgcttaatcagtgaggcacctatctcagcgatctgtctatttcgttcatccatagttgcctgactccccgtcgtgtagataactacgatacgggagggcttaccatctggccccagtgctgcaatgataccgcgagacccacgctcaccggctccagatttatcagcaataaaccagccagccggaagggccgagcgcagaagtggtcctgcaactttatccgcctccatccagtctattaattgttgccgggaagctagagtaagtagttcgccagttaatagtttgcgcaacgttgttgccattgctacaggcatcgtggtgtcacgctcgtcgtttggtatggcttcattcagctccggttcccaacgatcaaggcgagttacatgatcccccatgttgtgcaaaaaagcggttagctccttcggtcctccgatcgttgtcagaagtaagttggccgcagtgttatcactcatggttatggcagcactgcataattctcttactgtcatgccatccgtaagatgcttttctgtgactggtgagtactcaaccaagtcattctgagaatagtgtatgcggcgaccgagttgctcttgcccggcgtcaatacgggataataccgcgccacatagcagaactttaaaagtgctcatcattggaaaacgttcttcggggcgaaaactctcaaggatcttaccgctgttgagatccagttcgatgtaacccactcgtgcacccaactgatcttcagcatcttttactttcaccagcgtttctgggtgagcaaaaacaggaaggcaaaatgccgcaaaaaagggaataagggcgacacggaaatgttgaatactcatactcttcctttttcaatattattgaagcatttatcagggttattgtctcatgagcggatacatatttgaatgtatttagaaaaataaacaaataggggttccgcgcacatttccccgaaaagtgccacctaaattgtaagcgttaatattttgttaaaattcgcgttaaatttttgttaaatcagctcattttttaaccaataggccgaaatcggcaaaatcccttataaatcaaaagaatagaccgagatagggttgagtgttgttccagtttggaacaagagtccactattaaagaacgtggactccaacgtcaaagggcgaaaaaccgtctatcagggcgatggcccactacgtgaaccatcaccctaatcaagttttttggggtcgaggtgccgtaaagcactaaatcggaaccctaaagggagcccccgatttagagcttgacggggaaagccggcgaacgtggcgagaaaggaagggaagaaagcgaaaggagcgggcgctagggcgctggcaagtgtagcggtcacgctgcgcgtaaccaccacacccgccgcgcttaatgcgccgctacagggcgcgtc

SEQ ID NO: 3 - DNA, 8149 bp, Artificial Sequence
  Description of Artificial Sequence: Synthetic polynucleotide
cattcgccattcaggctgcaaataagcgttgatattcagtcaattacaaacattaataacgaagagatgacagaaaaattttcattctgtgacagagaaaaagtagccgaagatgacggtttgtcacatggagttggcaggatgtttgattaaaaacataacaggaagaaaaatgccccgctgtgggcggacaaaatagttgggaactgggaggggtggaaatggagtttttaaggattatttagggaagagtgacaaaatagatgggaactgggtgtagcgtcgtaagctaatacgaaaattaaaaatgacaaaatagtttggaactagatttcacttatctggttcggatctcctaggcgatatcagtgatcagatccagacatgataagatacattgatgagtttggacaaaccacaactagaatgcagtgaaaaaaatgctttatttgtgaaatttgtgatgctattgctttatttgtaaccattataagctgcaataaacaagttaacaacaacaattgcattcattttatgtttcaggttcagggggaggtgtgggaggttttttaaagcaagtaaaacctctacaaatgtggtatggctgattatgatcctctagtacttctcgacaagcttacattattgaagcatttatcagggttattgtctcagacctgcaggcagctgcgcgctcgctcgctcactgaggccgcccgggcaaagcccgggcgtcgggcgacctttggtcgcccggcctcagtgagcgagcgagcgcgcagagagggagtggccaactccatcactaggggttccttgtagttaatgattaacccgccatgctacttatctacgtagccatgctctagagcggccgcacgcgtggagctagttattaatagtaatcaattacggggtcattagttcatagcccatatatggagttccgcgttacataacttacggtaaatggcccgcctggctgaccgcccaacgacccccgcccattgacgtcaataatgacgtatgttcccatagtaacgtcaatagggactttccattgacgtcaatgggtggagtatttacggtaaactgcccacttggcagtacatcaagtgtatcatatgccaagtacgccccctattgacgtcaatgacggtaaatggcccgcctggcattatgcccagtacatgaccttatgggactttcctacttggcagtacatctacgtattagtcatcgctattaccatggtgatgcggttttggcagtacatcaatgggcgtggatagcggtttgactcacggggatttccaagtctccaccccattgacgtcaatgggagtttgttttgcaccaaaatcaacgggactttccaaaatgtcgtaacaactccgccccattgacgcaaatgggcggtaggcgtgtacggtgggaggtctatataagcagagctcgtttagtgaaccgtcagatcgcctggagacgccatccacgctgttttgacctccatagaagacaccgggaccgatccagcctccgcggattcgaatcccggccgggaacggtgcattggaacgcggattccccgtgccaagagtgacgtaagtaccgcctatagagtctataggcccacaaaaaatgctttcttcttttaatatacttttttgtttatcttatttctaatactttccctaatctctttctttcagggcaataatgatacaatgtatcatgcctctttgcaccattctaaagaataacagtgataatttctgggttaaggcaatagcaatatttctgcatataaatatttctgcatataaattgtaactgatgtaagaggtttcatattgctaatagcagctacaatccagctaccattctgcttttattttatggttgggataaggctggattattctgagtccaagctaggcccttttgctaatcatgttcatacctcttatcttcctcccacagctcctgggcaacgtgctggtctgtgtgctggcccatcactttggcaaagaattgggattcgaacatcggccgccaccatgaacgccagcgagttcaggaggaggggcaaggagatggtggactacgtggccaactacatggagggcatcgagggcaggcaggtgtaccccgacgtggagcccggctacctgaggcccctgatccccgccgccgccccccaggagcccgacaccttcgaggacatcatcaacgacgtggagaagatcatcatgcccggcgtgacccactggcacagcccctacttcttcgcctacttccccaccgccagcagctaccccgccatgctggccgacatgctgtgcggcgccatcggctgcatcggcttcagctgggccgccagccccgcctgcaccgagctggagaccgtgatgatggactggctgggcaagatgctggagctgcccaaggccttcctgaacgagaaggccggcgagggcggcggcgtgatccagggcagcgccagcgaggccaccctggtggccctgctggccgccaggaccaaggtgatccacaggctgcaggccgccagccccgagctgacccaggccgccatcatggagaagctggtggcctacagcagcgaccaggcccacagcagcgtggagagggccggcctgatcggcggcgtgaagctgaaggccatccccagcgacggcaacttcgccatgagggccagcgccctgcaggaggccctggagagggacaaggccgccggcctgatccccttcttcatggtggccaccctgggcaccaccacctgctgcagcttcgacaacctgctggaggtgggccccatctgcaacaaggaggacatctggctgcacgtggacgccgcctacgccggcagcgccttcatctgccccgagttcaggcacctgctgaacggcgtggagttcgccgacagcttcaacttcaacccccacaagtggctgctggtgaacttcgactgcagcgccatgtgggtgaagaagaggaccgacctgaccggcgccttcaggctggaccccacctacctgaagcacagccaccaggacagcggcctgatcaccgactacaggcactggcagatccccctgggcaggaggttcaggagcctgaagatgtggttcgtgttcaggatgtacggcgtgaagggcctgcaggcctacatcaggaagcacgtgcagctgagccacgagttcgagagcctggtgaggcaggaccccaggttcgagatctgcgtggaggtgatcctgggcctggtgtgcttcaggctgaagggcagcaacaaggtgaacgaggccctgctgcagaggatcaacagcgccaagaagatccacctggtgccctgccacctgagggacaagttcgtgctgaggttcgccatctgcagcaggaccgtggagagcgcccacgtgcagagggcctgggagcacatcaaggagctggccgccgacgtgctgagggccgagagggagtgagctgctcgagagatctacgggtggcatccctgtgacccctccccagtgcctctcctggccctggaagttgccactccagtgcccaccagccttgtcctaataaaattaagttgcatcattttgtctgactaggtgtccttctataatattatggggtggaggggggtggtatggagcaaggggcaagttgggaagacaacctgtagggcctgcggggtctattgggaaccaagctggagtgcagtggcacaatcttggctcactgcaatctccgcctcctgggttcaagcgattctcctgcctcagcctcccgagttgttgggattccaggcatgcatgaccaggctcagctaatttttgtttttttggtagagacggggtttcaccatattggccaggctggtctccaactcctaatctcaggtgatctacccaccttggcctcccaaattgctgggattacaggcgtgaaccactgctcccttccctgtccttctgattttgtaggtaacgtaaccccggaccacgtgcggaccgagcggccgctctagagcatggctacgtagataagtagcatggcgggttaatcattaactacaaggaacccctagtgatggagttggccactccctctctgcgcgctcgctcgctcactgaggccgggcgaccaaaggtcgcccgacgcccgggcggcctcagtgagcgagcgagcgcgcagctgcctgcaggtctgagacaataaccctgataaatgcttcaataatgtagccaaccactagaactatagctagagtcctgggcgaacaaacgatgctcgccttccagaaaaccgaggatgcgaaccacttcatccggggtcagcaccaccggcaagcgccgcgacggccgaggtcttccgatctcctgaagccagggcagatccgtgcacagcaccttgccgtagaagaacagcaaggccgccaatgcctgacgatgcgtggagaccgaaaccttgcgctcgttcgccagccaggacagaaatgcctcgacttcgctgctgcccaaggttgccgggtgacgcacaccgtggaaacggatgaaggcacgaacccagttgacataagcctgttcggttcgtaaactgtaatgcaagtagcgtatgcgctcacgcaactggtccagaaccttgaccgaacgcagcggtggtaacggcgcagtggcggttttcatggcttgttatgactgtttttttgtacagtctatgcctcgggcatccaagcagcaagcgcgttacgccgtgggtcgatgtttgatgttatggagcagcaacgatgttacgcagcagcaacgatgttacgcagcagggcagtcgccctaaaacaaagttaggtggctcaagtatgggcatcattcgcacatgtaggctcggccctgaccaagtcaaatccatgcgggctgctcttgatcttttcggtcgtgagttcggagacgtagccacctactcccaacatcagccggactccgattacctcgggaacttgctccgtagtaagacattcatcgcgcttgctgccttcgaccaagaagcggttgttggcgctctcgcggcttacgttctgcccaagtttgagcagccgcgtagtgagatctatatctatgatctcgcagtctccggcgagcaccggaggcagggcattgccaccgcgctcatcaatctcctcaagcatgaggccaacgcgcttggtgcttatgtgatctacgtgcaagcagattacggtgacgatcccgcagtggctctctatacaaagttgggcatacgggaagaagtgatgcactttgatatcgacccaagtaccgccacctaacaattcgttcaagccgagatcggcttcccggccgcggagttgttcggtaaattgtcacaacgccgcgaatatagtctttaccatgcccttggccacgcccctctttaatacgacgggcaatttgcacttcagaaaatgaagagtttgctttagccataacaaaagtccagtatgctttttcacagcataactggactgatttcagtttacaactattctgtctagtttaagactttattgtcatagtttagatctattttgttcagtttaagactttattgtccgcccacacccgcttacgcagggcatccatttattactcaaccgtaaccgattttgccaggttacgcggctggtctatgcggtgtgaaataccgcacagatgcgtaaggagaaaataccgcatcaggcgctcttccgcttcctcgctcactgactcgctgcgctcggtcgttcggctgcggcgagcggtatcagctcactcaaaggcggtaatacggttatccacagaatcaggggataacgcaggaaagaacatgtgagcaaaaggccagcaaaaggccaggaaccgtaaaaaggccgcgttgctggcgtttttccataggctccgcccccctgacgagcatcacaaaaatcgacgctcaagtcagaggtggcgaaacccgacaggactataaagataccaggcgtttccccctggaagctccctcgtgcgctctcctgttccgaccctgccgcttaccggatacctgtccgcctttctcccttcgggaagcgtggcgctttctcatagctcacgctgtaggtatctcagttcggtgtaggtcgttcgctccaagctgggctgtgtgcacgaaccccccgttcagcccgaccgctgcgccttatccggtaactatcgtcttgagtccaacccggtaagacacgacttatcgccactggcagcagccactggtaacaggattagcagagcgaggtatgtaggcggtgctacagagttcttgaagtggtggcctaactacggctacactagaagaacagtatttggtatctgcgctctgctgaagccagttaccttcggaaaaagagttggtagctcttgatccggcaaacaaaccaccgctggtagcggtggtttttttgtttgcaagcagcagattacgcgcagaaaaaaaggatctcaagaagatcctttgatcttttctacggggtctgacgctcagtggaacgaaaactcacgttaagggattttggtcatgagattatcaaaaaggatcttcacctagatccttttaaattaaaaatgaagttttaaatcaatctaaagtatatatgagtaaacttggtctgacagttaccaatgcttaatcagtgaggcacctatctcagcgatctgtctatttcgttcatccatagttgcctgactccccgtcgtgtagataactacgatacgggagggcttaccatctggccccagtgctgcaatgataccgcgagacccacgctcaccggctccagatttatcagcaataaaccagccagccggaagggccgagcgcagaagtggtcctgcaactttatccgcctccatccagtctattaattgttgccgggaagctagagtaagtagttcgccagttaatagtttgcgcaacgttgttgccattgctacaggcatcgtggtgtcacgctcgtcgtttggtatggcttcattcagctccggttcccaacgatcaaggcgagttacatgatcccccatgttgtgcaaaaaagcggttagctccttcggtcctccgatcgttgtcagaagtaagttggccgcagtgttatcactcatggttatggcagcactgcataattctcttactgtcatgccatccgtaagatgcttttctgtgactggtgagtactcaaccaagtcattctgagaatagtgtatgcggcgaccgagttgctcttgcccggcgtcaatacgggataataccgcgccacatagcagaactttaaaagtgctcatcattggaaaacgttcttcggggcgaaaactctcaaggatcttaccgctgttgagatccagttcgatgtaacccactcgtgcacccaactgatcttcagcatcttttactttcaccagcgtttctgggtgagcaaaaacaggaaggcaaaatgccgcaaaaaagggaataagggcgacacggaaatgttgaatactcatactcttcctttttcaatattattgaagcatttatcagggttattgtctcatgagcggatacatatttgaatgtatttagaaaaataaacaaataggggttccgcgcacatttccccgaaaagtgccacctaaattgtaagcgttaatattttgttaaaattcgcgttaaatttttgttaaatcagctcattttttaaccaataggccgaaatcggcaaaatcccttataaatcaaaagaatagaccgagatagggttgagtgttgttccagtttggaacaagagtccactattaaagaacgtggactccaacgtcaaagggcgaaaaaccgtctatcagggcgatggcccactacgtgaaccatcaccctaatcaagttttttggggtcgaggtgccgtaaagcactaaatcggaaccctaaagggagcccccgatttagagcttgacggggaaagccggcgaacgtggcgagaaaggaagggaagaaagcgaaaggagcgggcgctagggcgctggcaagtgtagcggtcacgctgcgcgtaaccaccacacccgccgcgcttaatgcgccgctacagggcgcgtc

SEQ ID NO: 4 - DNA, 8555 bp, Artificial Sequence
  Description of Artificial Sequence: Synthetic polynucleotide
cattcgccattcaggctgcaaataagcgttgatattcagtcaattacaaacattaataacgaagagatgacagaaaaattttcattctgtgacagagaaaaagtagccgaagatgacggtttgtcacatggagttggcaggatgtttgattaaaaacataacaggaagaaaaatgccccgctgtgggcggacaaaatagttgggaactgggaggggtggaaatggagtttttaaggattatttagggaagagtgacaaaatagatgggaactgggtgtagcgtcgtaagctaatacgaaaattaaaaatgacaaaatagtttggaactagatttcacttatctggttcggatctcctaggcgatatcagtgatcagatccagacatgataagatacattgatgagtttggacaaaccacaactagaatgcagtgaaaaaaatgctttatttgtgaaatttgtgatgctattgctttatttgtaaccattataagctgcaataaacaagttaacaacaacaattgcattcattttatgtttcaggttcagggggaggtgtgggaggttttttaaagcaagtaaaacctctacaaatgtggtatggctgattatgatcctctagtacttctcgacaagcttacattattgaagcatttatcagggttattgtctcagacctgcaggcagctgcgcgctcgctcgctcactgaggccgcccgggcaaagcccgggcgtcgggcgacctttggtcgcccggcctcagtgagcgagcgagcgcgcagagagggagtggccaactccatcactaggggttccttgtagttaatgattaacccgccatgctacttatctacgtagccatgctctagagcggccgcacgcgtggagctagttattaatagtaatcaattacggggtcattagttcatagcccatatatggagttccgcgttacataacttacggtaaatggcccgcctggctgaccgcccaacgacccccgcccattgacgtcaataatgacgtatgttcccatagtaacgtcaatagggactttccattgacgtcaatgggtggagtatttacggtaaactgcccacttggcagtacatcaagtgtatcatatgccaagtacgccccctattgacgtcaatgacggtaaatggcccgcctggcattatgcccagtacatgaccttatgggactttcctacttggcagtacatctacgtattagtcatcgctattaccatggtgatgcggttttggcagtacatcaatgggcgtggatagcggtttgactcacggggatttccaagtctccaccccattgacgtcaatgggagtttgttttgcaccaaaatcaacgggactttccaaaatgtcgtaacaactccgccccattgacgcaaatgggcggtaggcgtgtacggtgggaggtctatataagcagagctcgtttagtgaaccgtcagatcgcctggagacgccatccacgctgttttgacctccatagaagacaccgggaccgatccagcctccgcggattcgaatcccggccgggaacggtgcattggaacgcggattccccgtgccaagagtgacgtaagtaccgcctatagagtctataggcccacaaaaaatgctttcttcttttaatatacttttttgtttatcttatttctaatactttccctaatctctttctttcagggcaataatgatacaatgtatcatgcctctttgcaccattctaaagaataacagtgataatttctgggttaaggcaatagcaatatttctgcatataaatatttctgcatataaattgtaactgatgtaagaggtttcatattgctaatagcagctacaatccagctaccattctgcttttattttatggttgggataaggctggattattctgagtccaagctaggcccttttgctaatcatgttcatacctcttatcttcctcccacagctcctgggcaacgtgctggtctgtgtgctggcccatcactttggcaaagaattgggattcgaacatcggccgccaccatgaacgcaagtgaattccgaaggagagggaaggagatggtggattacgtggccaactacatggaaggcattgagggacgccaggtctaccctgacgtggagcccgggtacctgcggccgctgatccctgccgctgcccctcaggagccagacacgtttgaggacatcatcaacgacgttgagaagataatcatgcctggggtgacgcactggcacagcccctacttcttcgcctacttccccactgccagctcgtacccggccatgcttgcggacatgctgtgcggggccattggctgcatcggcttctcctgggcggcaagcccagcatgcacagagctggagactgtgatgatggactggctcgggaagatgctggaactaccaaaggcatttttgaatgagaaagctggagaagggggaggagtgatccagggaagtgccagtgaagccaccctggtggccctgctggccgctcggaccaaagtgatccatcggctgcaggcagcgtccccagagctcacacaggccgctatcatggagaagctggtggcttactcatccgatcaggcacactcctcagtggaaagagctgggttaattggtggagtgaaattaaaagccatcccctcagatggcaacttcgccatgcgtgcgtctgccctgcaggaagccctggagagagacaaagcggctggcctgattcctttctttatggttgccaccctggggaccacaacatgctgctcctttgacaatctcttagaagtcggtcctatctgcaacaaggaagacatatggctgcacgttgatgcagcctacgcaggcagtgcattcatctgccctgagttccggcaccttctgaatggagtggagtttgcagattcattcaactttaatccccacaaatggctattggtgaattttgactgttctgccatgtgggtgaaaaagagaacagacttaacgggagcctttagactggaccccacttacctgaagcacagccatcaggattcagggcttatcactgactaccggcattggcagataccactgggcagaagatttcgctctttgaaaatgtggtttgtatttaggatgtatggagtcaaaggactgcaggcttatatccgcaagcatgtccagctgtcccatgagtttgagtcactggtgcgccaggatccccgctttgaaatctgtgtggaagtcattctggggcttgtctgctttcggctaaagggttccaacaaagtgaatgaagctcttctgcaaagaataaacagtgccaaaaaaatccacttggttccatgtcacctcagggacaagtttgtcctgcgctttgccatctgttctcgcacggtggaatctgcccatgtgcagcgggcctgggaacacatcaaagagctggcggccgacgtgctgcgagcagagagggagtaggagtgaagccagctgcaggaatcaaaaattgaagagagatatatctgaaaactggaataagaagcaaataaatatcatcctgccttcatggaactcagctgtctgtggcttcccatgtctttctccaaagttatccagagggttgtgattttgtctgcttagtatctcatcaacaaagaaatattatttgctaattaaaaagttaatcttcatggccatagcttttattcattagctgtgatttttgttgattaaaacattatagattttcatgttcttgcagtcatcagaagtggtaggaaagcctcactgatatattttccagggcaatcaatgttcacgcaacttgaaattatatctgtggtcttcaaattgtcttttgtcatgtggctaaatgcctaataagctgctcgagagatctacgggtggcatccctgtgacccctccccagtgcctctcctggccctggaagttgccactccagtgcccaccagccttgtcctaataaaattaagttgcatcattttgtctgactaggtgtccttctataatattatggggtggaggggggtggtatggagcaaggggcaagttgggaagacaacctgtagggcctgcggggtctattgggaaccaagctggagtgcagtggcacaatcttggctcactgcaatctccgcctcctgggttcaagcgattctcctgcctcagcctcccgagttgttgggattccaggcatgcatgaccaggctcagctaatttttgtttttttggtagagacggggtttcaccatattggccaggctggtctccaactcctaatctcaggtgatctacccaccttggcctcccaaattgctgggattacaggcgtgaaccactgctcccttccctgtccttctgattttgtaggtaaccgtaaccccggaccacgtgcggaccgagcggccgctctagagcatggctacgtagataagtagcatggcgggttaatcattaactacaaggaacccctagtgatggagttggccactccctctctgcgcgctcgctcgctcactgaggccgggcgaccaaaggtcgcccgacgcccgggcggcctcagtgagcgagcgagcgcgcagctgcctgcaggtctgagacaataaccctgataaatgcttcaataatgtagccaaccactagaactatagctagagtcctgggcgaacaaacgatgctcgccttccagaaaaccgaggatgcgaaccacttcatccggggtcagcaccaccggcaagcgccgcgacggccgaggtcttccgatctcctgaagccagggcagatccgtgcacagcaccttgccgtagaagaacagcaaggccgccaatgcctgacgatgcgtggagaccgaaaccttgcgctcgttcgccagccaggacagaaatgcctcgacttcgctgctgcccaaggttgccgggtgacgcacaccgtggaaacggatgaaggcacgaacccagttgacataagcctgttcggttcgtaaactgtaatgcaagtagcgtatgcgctcacgcaactggtccagaaccttgaccgaacgcagcggtggtaacggcgcagtggcggttttcatggcttgttatgactgtttttttgtacagtctatgcctcgggcatccaagcagcaagcgcgttacgccgtgggtcgatgtttgatgttatggagcagcaacgatgttacgcagcagcaacgatgttacgcagcagggcagtcgccctaaaacaaagttaggtggctcaagtatgggcatcattcgcacatgtaggctcggccctgaccaagtcaaatccatgcgggctgctcttgatcttttcggtcgtgagttcggagacgtagccacctactcccaacatcagccggactccgattacctcgggaacttgctccgtagtaagacattcatcgcgcttgctgccttcgaccaagaagcggttgttggcgctctcgcggcttacgttctgcccaagtttgagcagccgcgtagtgagatctatatctatgatctcgcagtctccggcgagcaccggaggcagggcattgccaccgcgctcatcaatctcctcaagcatgaggccaacgcgcttggtgcttatgtgatctacgtgcaagcagattacggtgacgatcccgcagtggctctctatacaaagttgggcatacgggaagaagtgatgcactttgatatcgacccaagtaccgccacctaacaattcgttcaagccgagatcggcttcccggccgcggagttgttcggtaaattgtcacaacgccgcgaatatagtctttaccatgcccttggccacgcccctctttaatacgacgggcaatttgcacttcagaaaatgaagagtttgctttagccataacaaaagtccagtatgctttttcacagcataactggactgatttcagtttacaactattctgtctagtttaagactttattgtcatagtttagatctattttgttcagtttaagactttattgtccgcccacacccgcttacgcagggcatccatttattactcaaccgtaaccgattttgccaggttacgcggctggtctatgcggtgtgaaataccgcacagatgcgtaaggagaaaataccgcatcaggcgctcttccgcttcctcgctcactgactcgctgcgctcggtcgttcggctgcggcgagcggtatcagctcactcaaaggcggtaatacggttatccacagaatcaggggataacgcaggaaagaacatgtgagcaaaaggccagcaaaaggccaggaaccgtaaaaaggccgcgttgctggcgtttttccataggctccgcccccctgacgagcatcacaaaaatcgacgctcaagtcagaggtggcgaaacccgacaggactataaagataccaggcgtttccccctggaagctccctcgtgcgctctcctgttccgaccctgccgcttaccggatacctgtccgcctttctcccttcgggaagcgtggcgctttctcatagctcacgctgtaggtatctcagttcggtgtaggtcgttcgctccaagctgggctgtgtgcacgaaccccccgttcagcccgaccgctgcgccttatccggtaactatcgtcttgagtccaacccggtaagacacgacttatcgccactggcagcagccactggtaacaggattagcagagcgaggtatgtaggcggtgctacagagttcttgaagtggtggcctaactacggctacactagaagaacagtatttggtatctgcgctctgctgaagccagttaccttcggaaaaagagttggtagctcttgatccggcaaacaaaccaccgctggtagcggtggtttttttgtttgcaagcagcagattacgcgcagaaaaaaaggatctcaagaagatcctttgatcttttctacggggtctgacgctcagtggaacgaaaactcacgttaagggattttggtcatgagattatcaaaaaggatcttcacctagatccttttaaattaaaaatgaagttttaaatcaatctaaagtatatatgagtaaacttggtctgacagttaccaatgcttaatcagtgaggcacctatctcagcgatctgtctatttcgttcatccatagttgcctgactccccgtcgtgtagataactacgatacgggagggcttaccatctggccccagtgctgcaatgataccgcgagacccacgctcaccggctccagatttatcagcaataaaccagccagccggaagggccgagcgcagaagtggtcctgcaactttatccgcctccatccagtctattaattgttgccgggaagctagagtaagtagttcgccagttaatagtttgcgcaacgttgttgccattgctacaggcatcgtggtgtcacgctcgtcgtttggtatggcttcattcagctccggttcccaacgatcaaggcgagttacatgatcccccatgttgtgcaaaaaagcggttagctccttcggtcctccgatcgttgtcagaagtaagttggccgcagtgttatcactcatggttatggcagcactgcataattctcttactgtcatgccatccgtaagatgcttttctgtgactggtgagtactcaaccaagtcattctgagaatagtgtatgcggcgaccgagttgctcttgcccggcgtcaatacgggataataccgcgccacatagcagaactttaaaagtgctcatcattggaaaacgttcttcggggcgaaaactctcaaggatcttaccgctgttgagatccagttcgatgtaacccactcgtgcacccaactgatcttcagcatcttttactttcaccagcgtttctgggtgagcaaaaacaggaaggcaaaatgccgcaaaaaagggaataagggcgacacggaaatgttgaatactcatactcttcctttttcaatattattgaagcatttatcagggttattgtctcatgagcggatacatatttgaatgtatttagaaaaataaacaaataggggttccgcgcacatttccccgaaaagtgccacctaaattgtaagcgttaatattttgttaaaattcgcgttaaatttttgttaaatcagctcattttttaaccaataggccgaaatcggcaaaatcccttataaatcaaaagaatagaccgagatagggttgagtgttgttccagtttggaacaagagtccactattaaagaacgtggactccaacgtcaaagggcgaaaaaccgtctatcagggcgatggcccactacgtgaaccatcaccctaatcaagttttttggggtcgaggtgccgtaaagcactaaatcggaaccctaaagggagcccccgatttagagcttgacggggaaagccggcgaacgtggcgagaaaggaagggaagaaagcgaaaggagcgggcgctagggcgctggcaagtgtagcggtcacgctgcgcgtaaccaccacacccgccgcgcttaatgcgccgctacagggcgcgtc

SEQ ID NO: 5 - DNA, 8694 bp, Artificial Sequence
  Description of Artificial Sequence: Synthetic polynucleotide
cattcgccattcaggctgcaaataagcgttgatattcagtcaattacaaacattaataacgaagagatgacagaaaaattttcattctgtgacagagaaaaagtagccgaagatgacggtttgtcacatggagttggcaggatgtttgattaaaaacataacaggaagaaaaatgccccgctgtgggcggacaaaatagttgggaactgggaggggtggaaatggagtttttaaggattatttagggaagagtgacaaaatagatgggaactgggtgtagcgtcgtaagctaatacgaaaattaaaaatgacaaaatagtttggaactagatttcacttatctggttcggatctcctaggcgatatcagtgatcagatccagacatgataagatacattgatgagtttggacaaaccacaactagaatgcagtgaaaaaaatgctttatttgtgaaatttgtgatgctattgctttatttgtaaccattataagctgcaataaacaagttaacaacaacaattgcattcattttatgtttcaggttcagggggaggtgtgggaggttttttaaagcaagtaaaacctctacaaatgtggtatggctgattatgatcctctagtacttctcgacaagcttacattattgaagcatttatcagggttattgtctcagacctgcaggcagctgcgcgctcgctcgctcactgaggccgcccgggcaaagcccgggcgtcgggcgacctttggtcgcccggcctcagtgagcgagcgagcgcgcagagagggagtggccaactccatcactaggggttccttgtagttaatgattaacccgccatgctacttatctacgtagccatgctctagagcggccgcaacgcgtaaacttcgtcgacgatctgcggccgcacgcgtggagctagttattaatagtaatcaattacggggtcattagttcatagcccatatatggagttccgcgttacataacttacggtaaatggcccgcctggctgaccgcccaacgacccccgcccattgacgtcaataatgacgtatgttcccatagtaacgtcaatagggactttccattgacgtcaatgggtggagtatttacggtaaactgcccacttggcagtacatcaagtgtatcatatgccaagtacgccccctattgacgtcaatgacggtaaatggcccgcctggcattatgcccagtacatgaccttatgggactttcctacttggcagtacatctacgtattagtcatcgctattaccatggtgatgcggttttggcagtacatcaatgggcgtggatagcggtttgactcacggggatttccaagtctccaccccattgacgtcaatgggagtttgttttgcaccaaaatcaacgggactttccaaaatgtcgtaacaactccgccccattgacgcaaatgggcggtaggcgtgtacggtgggaggtctatataagcagagctcgtttagtgaaccgtcagatcgcctggagacgccatccacgctgttttgacctccatagaagacaccgggaccgatccagcctccgcggattcgaatcccggccgggaacggtgcattggaacgcggattccccgtgccaagagtgacgtaagtaccgcctatagagtctataggcccacaaaaaatgctttcttcttttaatatacttttttgtttatcttatttctaatactttccctaatctctttctttcagggcaataatgatacaatgtatcatgcctctttgcaccattctaaagaataacagtgataatttctgggttaaggcaatagcaatatttctgcatataaatatttctgcatataaattgtaactgatgtaagaggtttcatattgctaatagcagctacaatccagctaccattctgcttttattttatggttgggataaggctggattattctgagtccaagctaggcccttttgctaatcatgttcatacctcttatcttcctcccacagctcctgggcaacgtgctggtctgtgtgctggcccatcactttggcaaagaattgggattcgaacatcgaattcgggcacgagggaggacagagagcaagtcactcccggctgcctttttcacctctgacagagcccagacaccatgaacgcaagtgaattccgaaggagagggaaggagatggtggattacgtggccaactacatggaaggcattgagggacgccaggtctaccctgacgtggagcccgggtacctgcggccgctgatccctgccgctgcccctcaggagccagacacgtttgaggacatcatcaacgacgttgagaagataatcatgcctggggtgacgcactggcacagcccctacttcttcgcctacttccccactgccagctcgtacccggccatgcttgcggacatgctgtgcggggccattggctgcatcggcttctcctgggcggcaagcccagcatgcacagagctggagactgtgatgatggactggctcgggaagatgctggaactaccaaaggcatttttgaatgagaaagctggagaagggggaggagtgatccagggaagtgccagtgaagccaccctggtggccctgctggccgctcggaccaaagtgatccatcggctgcaggcagcgtccccagagctcacacaggccgctatcatggagaagctggtggcttactcatccgatcaggcacactcctcagtggaaagagctgggttaattggtggagtgaaattaaaagccatcccctcagatggcaacttcgccatgcgtgcgtctgccctgcaggaagccctggagagagacaaagcggctggcctgattcctttctttatggttgccaccctggggaccacaacatgctgctcctttgacaatctcttagaagtcggtcctatctgcaacaaggaagacatatggctgcacgttgatgcagcctacgcaggcagtgcattcatctgccctgagttccggcaccttctgaatggagtggagtttgcagattcattcaactttaatccccacaaatggctattggtgaattttgactgttctgccatgtgggtgaaaaagagaacagacttaacgggagcctttagactggaccccacttacctgaagcacagccatcaggattcagggcttatcactgactaccggcattggcagataccactgggcagaagatttcgctctttgaaaatgtggtttgtatttaggatgtatggagtcaaaggactgcaggcttatatccgcaagcatgtccagctgtcccatgagtttgagtcactggtgcgccaggatccccgctttgaaatctgtgtggaagtcattctggggcttgtctgctttcggctaaagggttccaacaaagtgaatgaagctcttctgcaaagaataaacagtgccaaaaaaatccacttggttccatgtcacctcagggacaagtttgtcctgcgctttgccatctgttctcgcacggtggaatctgcccatgtgcagcgggcctgggaacacatcaaagagctggcggccgacgtgctgcgagcagagagggagtaggagtgaagccagctgcaggaatcaaaaattgaagagagatatatctgaaaactggaataagaagcaaataaatatcatcctgccttcatggaactcagctgtctgtggcttcccatgtctttctccaaagttatccagagggttgtgattttgtctgcttagtatctcatcaacaaagaaatattatttgctaattaaaaagttaatcttcatggccatagcttttattcattagctgtgatttttgttgattaaaacattatagattttcatgttcttgcagtcatcagaagtggtaggaaagcctcactgatatattttccagggcaatcaatgttcacgcaacttgaaattatatctgtggtcttcaaattgtcttttgtcatgtggctaaatgcctaataaacaattcaagtgaaatactaaaaaaaaaaaaaaaaaaaaaagctgctcgagagatctacgggtggcatccctgtgacccctccccagtgcctctcctggccctggaagttgccactccagtgcccaccagccttgtcctaataaaattaagttgcatcattttgtctgactaggtgtccttctataatattatggggtggaggggggtggtatggagcaaggggcaagttgggaagacaacctgtagggcctgcggggtctattgggaaccaagctggagtgcagtggcacaatcttggctcactgcaatctccgcctcctgggttcaagcgattctcctgcctcagcctcccgagttgttgggattccaggcatgcatgaccaggctcagctaatttttgtttttttggtagagacggggtttcaccatattggccaggctggtctccaactcctaatctcaggtgatctacccaccttggcctcccaaattgctgggattacaggcgtgaaccactgctcccttccctgtccttctgattttgtaggtaacgtaaccccggaccacgtgcggaccgagcggccgctctagagcatggctacgtagataagtagcatggcgggttaatcattaactacaaggaacccctagtgatggagttggccactccctctctgcgcgctcgctcgctcactgaggccgggcgaccaaaggtcgcccgacgcccgggcggcctcagtgagcgagcgagcgcgcagctgcctgcaggtctgagacaataaccctgataaatgcttcaataatgtagccaaccactagaactatagctagagtcctgggcgaacaaacgatgctcgccttccagaaaaccgaggatgcgaaccacttcatccggggtcagcaccaccggcaagcgccgcgacggccgaggtcttccgatctcctgaagccagggcagatccgtgcacagcaccttgccgtagaagaacagcaaggccgccaatgcctgacgatgcgtggagaccgaaaccttgcgctcgttcgccagccaggacagaaatgcctcgacttcgctgctgcccaaggttgccgggtgacgcacaccgtggaaacggatgaaggcacgaacccagttgacataagcctgttcggttcgtaaactgtaatgcaagtagcgtatgcgctcacgcaactggtccagaaccttgaccgaacgcagcggtggtaacggcgcagtggcggttttcatggcttgttatgactgtttttttgtacagtctatgcctcgggcatccaagcagcaagcgcgttacgccgtgggtcgatgtttgatgttatggagcagcaacgatgttacgcagcagcaacgatgttacgcagcagggcagtcgccctaaaacaaagttaggtggctcaagtatgggcatcattcgcacatgtaggctcggccctgaccaagtcaaatccatgcgggctgctcttgatcttttcggtcgtgagttcggagacgtagccacctactcccaacatcagccggactccgattacctcgggaacttgctccgtagtaagacattcatcgcgcttgctgccttcgaccaagaagcggttgttggcgctctcgcggcttacgttctgcccaagtttgagcagccgcgtagtgagatctatatctatgatctcgcagtctccggcgagcaccggaggcagggcattgccaccgcgctcatcaatctcctcaagcatgaggccaacgcgcttggtgcttatgtgatctacgtgcaagcagattacggtgacgatcccgcagtggctctctatacaaagttgggcatacgggaagaagtgatgcactttgatatcgacccaagtaccgccacctaacaattcgttcaagccgagatcggcttcccggccgcggagttgttcggtaaattgtcacaacgccgcgaatatagtctttaccatgcccttggccacgcccctctttaatacgacgggcaatttgcacttcagaaaatgaagagtttgctttagccataacaaaagtccagtatgctttttcacagcataactggactgatttcagtttacaactattctgtctagtttaagactttattgtcatagtttagatctattttgttcagtttaagactttattgtccgcccacacccgcttacgcagggcatccatttattactcaaccgtaaccgattttgccaggttacgcggctggtctatgcggtgtgaaataccgcacagatgcgtaaggagaaaataccgcatcaggcgctcttccgcttcctcgctcactgactcgctgcgctcggtcgttcggctgcggcgagcggtatcagctcactcaaaggcggtaatacggttatccacagaatcaggggataacgcaggaaagaacatgtgagcaaaaggccagcaaaaggccaggaaccgtaaaaaggccgcgttgctggcgtttttccataggctccgcccccctgacgagcatcacaaaaatcgacgctcaagtcagaggtggcgaaacccgacaggactataaagataccaggcgtttccccctggaagctccctcgtgcgctctcctgttccgaccctgccgcttaccggatacctgtccgcctttctcccttcgggaagcgtggcgctttctcatagctcacgctgtaggtatctcagttcggtgtaggtcgttcgctccaagctgggctgtgtgcacgaaccccccgttcagcccgaccgctgcgccttatccggtaactatcgtcttgagtccaacccggtaagacacgacttatcgccactggcagcagccactggtaacaggattagcagagcgaggtatgtaggcggtgctacagagttcttgaagtggtggcctaactacggctacactagaagaacagtatttggtatctgcgctctgctgaagccagttaccttcggaaaaagagttggtagctcttgatccggcaaacaaaccaccgctggtagcggtggtttttttgtttgcaagcagcagattacgcgcagaaaaaaaggatctcaagaagatcctttgatcttttctacggggtctgacgctcagtggaacgaaaactcacgttaagggattttggtcatgagattatcaaaaaggatcttcacctagatccttttaaattaaaaatgaagttttaaatcaatctaaagtatatatgagtaaacttggtctgacagttaccaatgcttaatcagtgaggcacctatctcagcgatctgtctatttcgttcatccatagttgcctgactccccgtcgtgtagataactacgatacgggagggcttaccatctggccccagtgctgcaatgataccgcgagacccacgctcaccggctccagatttatcagcaataaaccagccagccggaagggccgagcgcagaagtggtcctgcaactttatccgcctccatccagtctattaattgttgccgggaagctagagtaagtagttcgccagttaatagtttgcgcaacgttgttgccattgctacaggcatcgtggtgtcacgctcgtcgtttggtatggcttcattcagctccggttcccaacgatcaaggcgagttacatgatcccccatgttgtgcaaaaaagcggttagctccttcggtcctccgatcgttgtcagaagtaagttggccgcagtgttatcactcatggttatggcagcactgcataattctcttactgtcatgccatccgtaagatgcttttctgtgactggtgagtactcaaccaagtcattctgagaatagtgtatgcggcgaccgagttgctcttgcccggcgtcaatacgggataataccgcgccacatagcagaactttaaaagtgctcatcattggaaaacgttcttcggggcgaaaactctcaaggatcttaccgctgttgagatccagttcgatgtaacccactcgtgcacccaactgatcttcagcatcttttactttcaccagcgtttctgggtgagcaaaaacaggaaggcaaaatgccgcaaaaaagggaataagggcgacacggaaatgttgaatactcatactcttcctttttcaatattattgaagcatttatcagggttattgtctcatgagcggatacatatttgaatgtatttagaaaaataaacaaataggggttccgcgcacatttccccgaaaagtgccacctaaattgtaagcgttaatattttgttaaaattcgcgttaaatttttgttaaatcagctcattttttaaccaataggccgaaatcggcaaaatcccttataaatcaaaagaatagaccgagatagggttgagtgttgttccagtttggaacaagagtccactattaaagaacgtggactccaacgtcaaagggcgaaaaaccgtctatcagggcgatggcccactacgtgaaccatcaccctaatcaagttttttggggtcgaggtgccgtaaagcactaaatcggaaccctaaagggagcccccgatttagagcttgacggggaaagccggcgaacgtggcgagaaaggaagggaagaaagcgaaaggagcgggcgctagggcgctggcaagtgtagcggtcacgctgcgcgtaaccaccacacccgccgcgcttaatgcgccgctacagggcgcgtc

SEQ ID NO: 6 - DNA, 9266 bp, Artificial Sequence
  Description of Artificial Sequence: Synthetic polynucleotide
gagaggcggtttgcgtattgggcgctcttccgcttcctcgctcactgactcgctgcgctcggtcgttcggctgcggcgagcggtatcagctcactcaaaggcggtaatacggttatccacagaatcaggggataacgcaggaaagaacatgtgagcaaaaggccagcaaaaggccaggaaccgtaaaaaggccgcgttgctggcgttttgagatcctttttttctgcgcgtaatctgctgcttgcaaacaaaaaaaccaccgctaccagcggtggtttgtttgccggatcaagagctaccaactctttttccgaaggtaactggcttcagcagagcgcagataccaaatactgttcttctagtgtagccgtagttaggccaccacttcaagaactctgtagcaccgcctacatacctcgctctgctaatcctgttaccagtggctgctgccagtggcgataagtcgtgtcttaccgggttggactcaagacgatagttaccggataaggcgcagcggtcgggctgaacggggggttcgtgcacacagcccagcttggagcgaacgacctacaccgaactgagatacctacagcgtgagctatgagaaagcgccacgcttcccgaagggagaaaggcggacaggtatccggtaagcggcagggtcggaacaggagagcgcacgagggagcttccagggggaaacgcctggtatctttatagtcctgtcgggtttcgccacctctgacttgagcgtcgatttttgtgatgctcgtcaggggggcggagcctatggaaagaagatcctttgatcttttctacggggtctgacgctcagtggaacgaaaactcacgttaagggattttggtcatgagattatcaaaaaggatcttcacctagatccttttaaattaaaaatgaagttttaaatcaagcccaatctgaataatgttacaaccaattaaccaattctgaaaacgcgcgatgcagctctggcccgtgtctcaaaatctctgatgttacattgcacaagataaaaatatatcatcatgaacaataaaactgtctgcttacataaacagtaatacaaggggtgttatgagccatattcaacgggaaacgtcgaggccgcgattaaattccaacatggatgctgatttatatgggtataaatgggctcgcgataatgtcgggcaatcaggtgcgacaatctatcgcttgtatgggaagcccgatgcgccagagttgtttctgaaacatggcaaaggtagcgttgccaatgatgttacagatgagatggtcagactaaactggctgacggaatttatgcctcttccgaccatcaagcattttatccgtactcctgatgatgcatggttactcaccactgcgatccccggaaaaacagcattccaggtattagaagaatatcctgattcaggtgaaaatattgttgatgcgctggcagtgttcctgcgccggttgcattcgattcctgtttgtaattgtccttttaacagcgatcgcgtatttcgtctcgctcaggcgcaatcacgaatgaataacggtttggttgatgcgagtgattttgatgacgagcgtaatggctggcctgttgaacaagtctggaaagaaatgcataaacttttgccattctcaccggattcagtcgtcactcatggtgatttctcacttgataaccttatttttgacgaggggaaattaataggttgtattgatgttggacgagtcggaatcgcagaccgataccaggatcttgccatcctatggaactgcctcggtgagttttctccttcattacagaaacggctttttcaaaaatatggtattgataatcctgatatgaataaattgcagtttcatttgatgctcgatgagtttttctaatcagaattggttaattggttgtaacattattcagattgggcttgatttaaaacttcatttttaatttaaaaggatctaggtgaagatcctttttgataatctcatgaccaaaatcccttaacgtgagttttcgttccactgagcgtcagaccccgtagaaaagatcaaaggatcttcaacaccccttgtattactgtttatgtaagcagacagttttattgttcatgatgatatatttttatcttgtgcaatgtaacatcagagattttgagacacgggccagagctgcatcgcgcgtttcggtgatgacggtgaaaacctctgacacatgcagctcccgtatctggaggctataaatgattacgatacttcgaaaacatccttatcctggaaaactccccgttcatttcccactctcctgccattcgacactcgtgcgtccattcaagtctgtgctaatttctacgcatttccctctgccattgactttgcttgcgtgggataataactattaagccaacttgattcaactcaggcattcaaaaggcattttgattagtcgaaaagtggcacggctgacgagtggagctgccatttcacgtttatttcgaacttttgattacatggtatatttagtaatacacatattttttagccagcaggttaatacttcaaagttgtttcgattttcaacgaataaaaggaatttggcatggtgttttttctggtctttggtattgacaaatcagggatatacaatatgtattaacaaaattggattgctacatatatttaatgattttcattattagaatgggtggaataaagttttaaattacattattaatttcattagggttggctgattgattactatttcctcattgaattgcattcgatattagcagtatttatctggcccattttggaagttacttaaatttcgaaccttaagtcattattagagctaatatacaacagagttgtcaacttggtttgatcagcattgaaattaaactgatttcttgttcgttcttatttcgtttggttttgtatctcgtattttatatgcaggagggcatatattggcacaagacaaataatcacagcacccattctcaactttgtcctgtttctcagtttagtgtaaatagaatgttgcaaaaaattgaatataagcattatcatagtgtcaaattcgagaggatgagtttgctgtgggtcttcgaggttctttccctgtgtttgccacggttcgttgcacgttgccactgattggacacatgtccgcagtgaaaaatctacggtcaggtaccacccaactaaaccggaaggcggcacgtgtgtgggcgttgagcggtgtgggcgtggcagccatataatgagacatttatttaaaaagaacattcgaacatttttgatgggccatatcttggcttgtcaagctccagggcagacattttcctcgactccaccgcctttttcatttgaatggaggaggtgtagggcacaaaaaacgtttcctgcctttttaagcagcacaaaggatatgagccattaaattagttaatttcgagtgcatttcattttaaataagtgttggaaagggaataaaaaagcgactgatagaaaagttgcagacaccaagagaatgttaaatattttaataatagctacatttttctatctctgtgacaaggcctgtgtactttaatgttatattacttctttgtgtttgatttctgttaaaagtttatgattttggcatgtacaaatcttacaacccttttttgtcatcatgacaaaatcaaaatcgtgcaatatttccattctcatcttttagccgattcataacattcgtagaaattaatatgaaatcaatcatgtataattttcatgcacgttatgccgatttggtatcgtcgatttgccggctcatcgtcgccattgtgttaatggaaaagttatgcttttcgcaggaaaaaagagttgaaaattccaatttttgtcatgctcatcaaaatgttatacattcggtaatttgagctggccaaacgttaaccccttatcgccccgcgcaagcattcattaactgcccccagagcgtaattaatctctttctcgcagaatttccttcacagccacgtcttgggtaaaagtcacccctcaaagtggcagttgcatgttgtaaattagattttcgtccgtcatgacaaccctcgtgcgagggttgctgcagcatttgaatgcaaaactgcttttggtcattaacctgtctgaggcactttgctgcaaaacttctattagaattcggtttggactcgaattcggatttcttcccccaaaatgcgatggctacagcaaaatgctttcagcttccgaagttttgcaaccccaaagtccagagtttccacgctgtcacgattccaaagcggcgccatttttggctcacgcaaaacttattaatgaactttaagcagactacgaggaaagggctataatggccacacaaaagggttaagcaagtgttaagggctggtgggagggaaaaatcatcaatcatattttctgcatagctgaatcatttgcgccgatcagttggggttacttaatgggtttatttcaagaagaaaactgtgggaaactaactgactctaaacttaatcagattaaatgtaacctggagatgattttcaaaatattaaaagagttttatggaggtaattttaaagaaaactgaaaaactttgaagaagtctataatagatccagtcttaatcgtagcactgattatttgtttttaaattggaaaaaattaaatgatacatcatgcttaaatgcgatgtccaacaaatcccaagacggtaatttccgtgcgttccaaactcatctgaagaatcttacaaatacatttcgtgtatccccaggctcagcgtgcaaataaatcttttggatctttgcaaatgcgaaatgcttatttttatgcgttttcaatgccaattcgatggcaaaaccaacaaaatcacatggaaataatggaaaagcaatttccatttctacaagggaggcagtgagacacaagagcagcgtatacaattccccagcagcgatttgaccattaaaattatacccacaggacgagcaggcataaaaagcagaggatgcgaggtgttcaggggactgtctatatctccaacttgaatatatgaaatcgtttggaaatagccaagcgaccaaattggcatttggaaaattgcacaacgacagaagaagatgtttgaaaagagaaattgaaataataaaccaagatatatgtaaacggttggtcacatttgggttctgagacggtcacagcttgtctgtaagcggatgccgggagcagacaagcccgtcagggcgcgtcagcgggtgttggcgggtgtcggggctggcttaactatgcggcatcagagcagattgtactgagagtgcaccatatgcggtgtgaaataccgcacagatgcgtaaggagaaaataccgcatcaggcgccattcgccattcaggctgcgcaactgttgggaagggcgatcggtgcgggcctcttcgctattacgccagctggcgaaagggggatgtgctgcaaggcgattaagttgggtaacgccagggttttcccagtcacgacgttgtaaaacgacggccagtgaattcgagctcggtaccatttaaatcgtcttggccactccctctctgcgcgctcgctcgctcactgaggccgcccgggcaaagcccgggcgtcgggcgacctttggtcgcccggcctcagtgagcgagcgagcgcgcagagagggagtggccaactccatcactaggggttccttcgcgagcttaattaactgcggccgctcggtccgcacgtggttacctacaaaatcagaaggacagggaagggagcagtggttcacgcctgtaatcccagcaatttgggaggccaaggtgggtagatcacctgagattaggagttggagaccagcctggccaatatggtgaaaccccgtctctaccaaaaaaacaaaaattagctgagcctggtcatgcatgcctggaatcccaacaactcgggaggctgaggcaggagaatcgcttgaacccaggaggcggagattgcagtgagccaagattgtgccactgcactccagcttggttcccaatagaccccgcaggccctacaggttgtcttcccaacttgccccttgctccataccacccccctccaccccataatattatagaaggacacctagtcagacaaaatgatgcaacttaattttattaggacaaggctggtgggcactggagtggcaacttccagggccaggagaggcactggggaggggtcacagggatgccacccgtagatctctcgagcagctcactcctactccctctctgctcgcagcacgtcggccgccagctctttgatgtgttcccaggcccgctgcacatgggcagattccaccgtgcgagaacagatggcaaagcgcaggacaaacttgtccctgaggtgacatggaaccaagtggatttttttggcactgtttattctttgcagaagagcttcattcactttgttggaaccctttagccgaaagcagacaagccccagaatgacttccacacagatttcaaagcggggatcctggcgcaccagtgactcaaactcatgggacagctggacatgcttgcggatataagcctgcagtcctttgactccatacatcctaaatacaaaccacattttcaaagagcgaaatcttctgcccagtggtatctgccaatgccggtagtcagtgataagccctgaatcctgatggctgtgcttcaggtaagtggggtccagtctaaaggctcccgttaagtctgttctctttttcacccacatggcagaacagtcaaaattcaccaatagccatttgtggggattaaagttgaatgaatctgcaaactccactccattcagaaggtgccggaactcagggcagatgaatgcactgcctgcgtaggctgcatcaacgtgcagccatatgtcttccttgttgcagataggaccgacttctaagagattgtcaaaggagcagcatgttgtggtccccagggtggcaaccataaagaaaggaatcaggccagccgctttgtctctctccagggcttcctgcagggcagacgcacgcatggcgaagttgccatctgaggggatggcttttaatttcactccaccaattaacccagctctttccactgaggagtgtgcctgatcggatgagtaagccaccagcttctccatgatagcggcctgtgtgagctctggggacgctgcctgcagccgatggatcactttggtccgagcggccagcagggccaccagggtggcttcactggcacttccctggatcactcctcccccttctccagctttctcattcaaaaatgcctttggtagttccagcatcttcccgagccagtccatcatcacagtctccagctctgtgcatgctgggcttgccgcccaggagaagccgatgcagccaatggccccgcacagcatgtccgcaagcatggccgggtacgagctggcagtggggaagtaggcgaagaagtaggggctgtgccagtgcgtcaccccaggcatgattatcttctcaacgtcgttgatgatgtcctcaaacgtgtctggctcctgaggggcagcggcagggatcagcggccgcaggtacccgggctccacgtcagggtagacctggcgtccctcaatgccttccatgtagttggccacgtaatccaccatctccttccctctccttcggaattcacttgcgttcatggtggcggccgatgttcgaatcccaattctttgccaaagtgatgggccagcacacagaccagcacgttgcccaggagctgtgggaggaagataagaggtatgaacatgattagcaaaagggcctagcttggactcagaataatccagccttatcccaaccataaaataaaagcagaatggtagctggattgtagctgctattagcaatatgaaacctcttacatcagttacaatttatatgcagaaatatttatatgcagaaatattgctattgccttaacccagaaattatcactgttattctttagaatggtgcaaagaggcatgatacattgtatcattattgccctgaaagaaagagattagggaaagtattagaaataagataaacaaaaaagtatattaaaagaagaaagcattttttgtgggcctatagactctataggcggtacttacgtcactcttggcacggggaatccgcgttccaatgcaccgttcccggccgggattcgaatccgcggaggctggatcggtcccggtgtcttctatggaggtcaaaacagcgtggatggcgtctccaggcgatctgacggttcactaaacgagctctgcttatatagacctcccaccgtacacgcctaccgcccatttgcgtcaatggggcggagttgttacgacattttggaaagtcccgttgattttggtgcaaaacaaactcccattgacgtcaatggggtggagacttggaaatccccgtgagtcaaaccgctatccacgcccattgatgtactgccaaaaccgcatcaccatggtaatagcgatgactaatacgtagatgtactgccaagtaggaaagtcccataaggtcatgtactgggcataatgccaggcgggccatttaccgtcattgacgtcaatagggggcgtacttggcatatgatacacttgatgtactgccaagtgggcagtttaccgtaaatactccacccattgacgtcaatggaaagtccctattgacgttactatgggaacatacgtcattattgacgtcaatgggcgggggtcgttgggcggtcagccaggcgggccatttaccgtaagttatgtaacgcggaactccatatatgggctatgaactaatgaccccgtaattgattactattaataactagctccacgcgtgcggccgcagatcgtcgacgaagtttaaactcaggaacccctagtgatggagttggccactccctctctgcgcgctcgctcgctcactgaggccgcccgggcaaagcccgggcgtcgggcgacctttggtcgcccggcctcagtgagcgagcgagcgcgcagagagggagtggccaacgtcatttaaatgcatgcaagcttggcgtaatcatggtcatagctgtttcctgtgtgaaaattgcgttgcgctcactgcccgctttccagtcgggaaacctgtcgtgccagctgcattaatgaatcggccaacgcgcggg

SEQ ID NO: 7 - DNA, 9236 bp, Artificial Sequence
  Description of Artificial Sequence: Synthetic polynucleotide
cccgcgcgttggccgattcattaatgcagctggcacgacaggtttcccgactggaaagcgggcagtgagcgcaacgcaattttcacacaggaaacagctatgaccatgattacgccaagcttgcatgcatttaaatgacgcagctgcgcgctcgctcgctcactgaggccgcccgggcaaagcccgggcgtcgggcgacctttggtcgcccggcctcagtgagcgagcgagcgcgcagagagggagtggccaactccatcactaggggttgagtttaaacttcgtcgacgatctgcggccgcacgcgtggagctagttattaatagtaatcaattacggggtcattagttcatagcccatatatggagttccgcgttacataacttacggtaaatggcccgcctggctgaccgcccaacgacccccgcccattgacgtcaataatgacgtatgttcccatagtaacgtcaatagggactttccattgacgtcaatgggtggagtatttacggtaaactgcccacttggcagtacatcaagtgtatcatatgccaagtacgccccctattgacgtcaatgacggtaaatggcccgcctggcattatgcccagtacatgaccttatgggactttcctacttggcagtacatctacgtattagtcatcgctattaccatggtgatgcggttttggcagtacatcaatgggcgtggatagcggtttgactcacggggatttccaagtctccaccccattgacgtcaatgggagtttgttttgcaccaaaatcaacgggactttccaaaatgtcgtaacaactccgccccattgacgcaaatgggcggtaggcgtgtacggtgggaggtctatataagcagagctcgtttagtgaaccgtcagatcgcctggagacgccatccacgctgttttgacctccatagaagacaccgggaccgatccagcctccgcggattcgaatcccggccgggaacggtgcattggaacgcggattccccgtgccaagagtgacgtaagtaccgcctatagagtctataggcccacaaaaaatgctttcttcttttaatatacttttttgtttatcttatttctaatactttccctaatctctttctttcagggcaataatgatacaatgtatcatgcctctttgcaccattctaaagaataacagtgataatttctgggttaaggcaatagcaatatttctgcatataaatatttctgcatataaattgtaactgatgtaagaggtttcatattgctaatagcagctacaatccagctaccattctgcttttattttatggttgggataaggctggattattctgagtccaagctaggcccttttgctaatcatgttcatacctcttatcttcctcccacagctcctgggcaacgtgctggtctgtgtgctggcccatcactttggcaaagaattgggattcgaacatcggccgccaccatgaacgcaagtgaattccgaaggagagggaaggagatggtggattacgtggccaactacatggaaggcattgagggacgccaggtctaccctgacgtggagcccgggtacctgcggccgctgatccctgccgctgcccctcaggagccagacacgtttgaggacatcatcaacgacgttgagaagataatcatgcctggggtgacgcactggcacagcccctacttcttcgcctacttccccactgccagctcgtacccggccatgcttgcggacatgctgtgcggggccattggctgcatcggcttctcctgggcggcaagcccagcatgcacagagctggagactgtgatgatggactggctcgggaagatgctggaactaccaaaggcatttttgaatgagaaagctggagaagggggaggagtgatccagggaagtgccagtgaagccaccctggtggccctgctggccgctcggaccaaagtgatccatcggctgcaggcagcgtccccagagctcacacaggccgctatcatggagaagctggtggcttactcatccgatcaggcacactcctcagtggaaagagctgggttaattggtggagtgaaattaaaagccatcccctcagatggcaacttcgccatgcgtgcgtctgccctgcaggaagccctggagagagacaaagcggctggcctgattcctttctttatggttgccaccctggggaccacaacatgctgctcctttgacaatctcttagaagtcggtcctatctgcaacaaggaagacatatggctgcacgttgatgcagcctacgcaggcagtgcattcatctgccctgagttccggcaccttctgaatggagtggagtttgcagattcattcaactttaatccccacaaatggctattggtgaattttgactgttctgccatgtgggtgaaaaagagaacagacttaacgggagcctttagactggaccccacttacctgaagcacagccatcaggattcagggcttatcactgactaccggcattggcagataccactgggcagaagatttcgctctttgaaaatgtggtttgtatttaggatgtatggagtcaaaggactgcaggcttatatccgcaagcatgtccagctgtcccatgagtttgagtcactggtgcgccaggatccccgctttgaaatctgtgtggaagtcattctggggcttgtctgctttcggctaaagggttccaacaaagtgaatgaagctcttctgcaaagaataaacagtgccaaaaaaatccacttggttccatgtcacctcagggacaagtttgtcctgcgctttgccatctgttctcgcacggtggaatctgcccatgtgcagcgggcctgggaacacatcaaagagctggcggccgacgtgctgcgagcagagagggagtaggagtgagctgctcgagagatctacgggtggcatccctgtgacccctccccagtgcctctcctggccctggaagttgccactccagtgcccaccagccttgtcctaataaaattaagttgcatcattttgtctgactaggtgtccttctataatattatggggtggaggggggtggtatggagcaaggggcaagttgggaagacaacctgtagggcctgcggggtctattgggaaccaagctggagtgcagtggcacaatcttggctcactgcaatctccgcctcctgggttcaagcgattctcctgcctcagcctcccgagttgttgggattccaggcatgcatgaccaggctcagctaatttttgtttttttggtagagacggggtttcaccatattggccaggctggtctccaactcctaatctcaggtgatctacccaccttggcctcccaaattgctgggattacaggcgtgaaccactgctcccttccctgtccttctgattttgtaggtaaccacgtgcggaccgagcggccgcagttaattaagctcgcgaaacccctagtgatggagttggccactccctctctgcgcgctcgctcgctcactgaggccgggcgaccaaaggtcgcccgacgcccgggctttgcccgggcggcctcagtgagcgagcgagcgcgcagctggacgatttaaatggtaccgagctcgaattcactggccgtcgttttacaacgtcgtgactgggaaaaccctggcgttacccaacttaatcgccttgcagcacatccccctttcgccagctggcgtaatagcgaagaggcccgcaccgatcgcccttcccaacagttgcgcagcctgaatggcgaatggcgcctgatgcggtattttctccttacgcatctgtgcggtatttcacaccgcatatggtgcactctcagtacaatctgctctgatgccgcatagttaagccagccccgacacccgccaacacccgctgacgcgccctgacgggcttgtctgctcccggcatccgcttacagacaagctgtgaccgtctcagaacccaaatgtgaccaaccgtttacatatatcttggtttattatttcaatttctcttttcaaacatcttcttctgtcgttgtgcaattttccaaatgccaatttggtcgcttggctatttccaaacgatttcatatattcaagttggagatatagacagtcccctgaacacctcgcatcctctgctttttatgcctgctcgtcctgtgggtataattttaatggtcaaatcgctgctggggaattgtatacgctgctcttgtgtctcactgcctcccttgtagaaatggaaattgcttttccattatttccatgtgattttgttggttttgccatcgaattggcattgaaaacgcataaaaataagcatttcgcatttgcaaagatccaaaagatttatttgcacgctgagcctggggatacacgaaatgtatttgtaagattcttcagatgagtttggaacgcacggaaattaccgtcttgggatttgttggacatcgcatttaagcatgatgtatcatttaattttttccaatttaaaaacaaataatcagtgctacgattaagactggatctattatagacttcttcaaagtttttcagttttctttaaaattacctccataaaactcttttaatattttgaaaatcatctccaggttacatttaatctgattaagtttagagtcagttagtttcccacagttttcttcttgaaataaacccattaagtaaccccaactgatcggcgcaaatgattcagctatgcagaaaatatgattgatgatttttccctcccaccagcccttaacacttgcttaacccttttgtgtggccattatagccctttcctcgtagtctgcttaaagttcattaataagttttgcgtgagccaaaaatggcgccgctttggaatcgtgacagcgtggaaactctggactttggggttgcaaaacttcggaagctgaaagcattttgctgtagccatcgcattttgggggaagaaatccgaattcgagtccaaaccgaattctaatagaagttttgcagcaaagtgcctcagacaggttaatgaccaaaagcagttttgcattcaaatgctgcagcaaccctcgcacgagggttgtcatgacggacgaaaatctaatttacaacatgcaactgccactttgaggggtgacttttacccaagacgtggctgtgaaggaaattctgcgagaaagagattaattacgctctgggggcagttaatgaatgcttgcgcggggcgataaggggttaacgtttggccagctcaaattaccgaatgtataacattttgatgagcatgacaaaaattggaattttcaactcttttttcctgcgaaaagcataacttttccattaacacaatggcgacgatgagccggcaaatcgacgataccaaatcggcataacgtgcatgaaaattatacatgattgatttcatattaatttctacgaatgttatgaatcggctaaaagatgagaatggaaatattgcacgattttgattttgtcatgatgacaaaaaagggttgtaagatttgtacatgccaaaatcataaacttttaacagaaatcaaacacaaagaagtaatataacattaaagtacacaggccttgtcacagagatagaaaaatgtagctattattaaaatatttaacattctcttggtgtctgcaacttttctatcagtcgcttttttattccctttccaacacttatttaaaatgaaatgcactcgaaattaactaatttaatggctcatatcctttgtgctgcttaaaaaggcaggaaacgttttttgtgccctacacctcctccattcaaatgaaaaaggcggtggagtcgaggaaaatgtctgccctggagcttgacaagccaagatatggcccatcaaaaatgttcgaatgttctttttaaataaatgtctcattatatggctgccacgcccacaccgctcaacgcccacacacgtgccgccttccggtttagttgggtggtacctgaccgtagatttttcactgcggacatgtgtccaatcagtggcaacgtgcaacgaaccgtggcaaacacagggaaagaacctcgaagacccacagcaaactcatcctctcgaatttgacactatgataatgcttatattcaattttttgcaacattctatttacactaaactgagaaacaggacaaagttgagaatgggtgctgtgattatttgtcttgtgccaatatatgccctcctgcatataaaatacgagatacaaaaccaaacgaaataagaacgaacaagaaatcagtttaatttcaatgctgatcaaaccaagttgacaactctgttgtatattagctctaataatgacttaaggttcgaaatttaagtaacttccaaaatgggccagataaatactgctaatatcgaatgcaattcaatgaggaaatagtaatcaatcagccaaccctaatgaaattaataatgtaatttaaaactttattccacccattctaataatgaaaatcattaaatatatgtagcaatccaattttgttaatacatattgtatatccctgatttgtcaataccaaagaccagaaaaaacaccatgccaaattccttttattcgttgaaaatcgaaacaactttgaagtattaacctgctggctaaaaaatatgtgtattactaaatataccatgtaatcaaaagttcgaaataaacgtgaaatggcagctccactcgtcagccgtgccacttttcgactaatcaaaatgccttttgaatgcctgagttgaatcaagttggcttaatagttattatcccacgcaagcaaagtcaatggcagagggaaatgcgtagaaattagcacagacttgaatggacgcacgagtgtcgaatggcaggagagtgggaaatgaacggggagttttccaggataaggatgttttcgaagtatcgtaatcatttatagcctccagatacgggagctgcatgtgtcagaggttttcaccgtcatcaccgaaacgcgcgatgcagctctggcccgtgtctcaaaatctctgatgttacattgcacaagataaaaatatatcatcatgaacaataaaactgtctgcttacataaacagtaatacaaggggtgttgaagatcctttgatcttttctacggggtctgacgctcagtggaacgaaaactcacgttaagggattttggtcatgagattatcaaaaaggatcttcacctagatccttttaaattaaaaatgaagttttaaatcaagcccaatctgaataatgttacaaccaattaaccaattctgattagaaaaactcatcgagcatcaaatgaaactgcaatttattcatatcaggattatcaataccatatttttgaaaaagccgtttctgtaatgaaggagaaaactcaccgaggcagttccataggatggcaagatcctggtatcggtctgcgattccgactcgtccaacatcaatacaacctattaatttcccctcgtcaaaaataaggttatcaagtgagaaatcaccatgagtgacgactgaatccggtgagaatggcaaaagtttatgcatttctttccagacttgttcaacaggccagccattacgctcgtcatcaaaatcactcgcatcaaccaaaccgttattcattcgtgattgcgcctgagcgagacgaaatacgcgatcgctgttaaaaggacaattacaaacaggaatcgaatgcaaccggcgcaggaacactgccagcgcatcaacaatattttcacctgaatcaggatattcttctaatacctggaatgctgtttttccggggatcgcagtggtgagtaaccatgcatcatcaggagtacggataaaatgcttgatggtcggaagaggcataaattccgtcagccagtttagtctgaccatctcatctgtaacatcattggcaacgctacctttgccatgtttcagaaacaactctggcgcatcgggcttcccatacaagcgatagattgtcgcacctgattgcccgacattatcgcgagcccatttatacccatataaatcagcatccatgttggaatttaatcgcggcctcgacgtttcccgttgaatatggctcataacaccccttgtattactgtttatgtaagcagacagttttattgttcatgatgatatatttttatcttgtgcaatgtaacatcagagattttgagacacgggccagagctgcatcgcgcgttttcagaattggttaattggttgtaacattattcagattgggcttgatttaaaacttcatttttaatttaaaaggatctaggtgaagatcctttttgataatctcatgaccaaaatcccttaacgtgagttttcgttccactgagcgtcagaccccgtagaaaagatcaaaggatcttctttccataggctccgcccccctgacgagcatcacaaaaatcgacgctcaagtcagaggtggcgaaacccgacaggactataaagataccaggcgtttccccctggaagctccctcgtgcgctctcctgttccgaccctgccgcttaccggatacctgtccgcctttctcccttcgggaagcgtggcgctttctcatagctcacgctgtaggtatctcagttcggtgtaggtcgttcgctccaagctgggctgtgtgcacgaaccccccgttcagcccgaccgctgcgccttatccggtaactatcgtcttgagtccaacccggtaagacacgacttatcgccactggcagcagccactggtaacaggattagcagagcgaggtatgtaggcggtgctacagagttcttgaagtggtggcctaactacggctacactagaagaacagtatttggtatctgcgctctgctgaagccagttaccttcggaaaaagagttggtagctcttgatccggcaaacaaaccaccgctggtagcggtggtttttttgtttgcaagcagcagattacgcgcagaaaaaaaggatctcaaaacgccagcaacgcggcctttttacggttcctggccttttgctggccttttgctcacatgttctttcctgcgttatcccctgattctgtggataaccgtattaccgcctttgagtgagctgataccgctcgccgcagccgaacgaccgagcgcagcgagtcagtgagcgaggaagcggaagagcgcccaatacgcaaaccgcctctc

SEQ ID NO: 8 - DNA, 6260 bp, Artificial Sequence
  Description of Artificial Sequence: Synthetic polynucleotide
cccgcgcgttggccgattcattaatgcagctggcacgacaggtttcccgactggaaagcgggcagtgagcgcaacgcaattttcacacaggaaacagctatgaccatgattacgccaagcttgcatgcatttaaatgacgttggccactccctctctgcgcgctcgctcgctcactgaggccgggcgaccaaaggtcgcccgacgcccgggctttgcccgggcggcctcagtgagcgagcgagcgcgcagagagggagtggccaactccatcactaggggttcctgagtttaaacttcgtcgacgatctgcggccgcacgcgtggagctagttattaatagtaatcaattacggggtcattagttcatagcccatatatggagttccgcgttacataacttacggtaaatggcccgcctggctgaccgcccaacgacccccgcccattgacgtcaataatgacgtatgttcccatagtaacgtcaatagggactttccattgacgtcaatgggtggagtatttacggtaaactgcccacttggcagtacatcaagtgtatcatatgccaagtacgccccctattgacgtcaatgacggtaaatggcccgcctggcattatgcccagtacatgaccttatgggactttcctacttggcagtacatctacgtattagtcatcgctattaccatggtgatgcggttttggcagtacatcaatgggcgtggatagcggtttgactcacggggatttccaagtctccaccccattgacgtcaatgggagtttgttttgcaccaaaatcaacgggactttccaaaatgtcgtaacaactccgccccattgacgcaaatgggcggtaggcgtgtacggtgggaggtctatataagcagagctcgtttagtgaaccgtcagatcgcctggagacgccatccacgctgttttgacctccatagaagacaccgggaccgatccagcctccgcggattcgaatcccggccgggaacggtgcattggaacgcggattccccgtgccaagagtgacgtaagtaccgcctatagagtctataggcccacaaaaaatgctttcttcttttaatatacttttttgtttatcttatttctaatactttccctaatctctttctttcagggcaataatgatacaatgtatcatgcctctttgcaccattctaaagaataacagtgataatttctgggttaaggcaatagcaatatttctgcatataaatatttctgcatataaattgtaactgatgtaagaggtttcatattgctaatagcagctacaatccagctaccattctgcttttattttatggttgggataaggctggattattctgagtccaagctaggcccttttgctaatcatgttcatacctcttatcttcctcccacagctcctgggcaacgtgctggtctgtgtgctggcccatcactttggcaaagaattgggattcgaacatcggccgccaccatgaacgccagcgagttcaggaggaggggcaaggagatggtggactacgtggccaactacatggagggcatcgagggcaggcaggtgtaccccgacgtggagcccggctacctgaggcccctgatccccgccgccgccccccaggagcccgacaccttcgaggacatcatcaacgacgtggagaagatcatcatgcccggcgtgacccactggcacagcccctacttcttcgcctacttccccaccgccagcagctaccccgccatgctggccgacatgctgtgcggcgccatcggctgcatcggcttcagctgggccgccagccccgcctgcaccgagctggagaccgtgatgatggactggctgggcaagatgctggagctgcccaaggccttcctgaacgagaaggccggcgagggcggcggcgtgatccagggcagcgccagcgaggccaccctggtggccctgctggccgccaggaccaaggtgatccacaggctgcaggccgccagccccgagctgacccaggccgccatcatggagaagctggtggcctacagcagcgaccaggcccacagcagcgtggagagggccggcctgatcggcggcgtgaagctgaaggccatccccagcgacggcaacttcgccatgagggccagcgccctgcaggaggccctggagagggacaaggccgccggcctgatccccttcttcatggtggccaccctgggcaccaccacctgctgcagcttcgacaacctgctggaggtgggccccatctgcaacaaggaggacatctggctgcacgtggacgccgcctacgccggcagcgccttcatctgccccgagttcaggcacctgctgaacggcgtggagttcgccgacagcttcaacttcaacccccacaagtggctgctggtgaacttcgactgcagcgccatgtgggtgaagaagaggaccgacctgaccggcgccttcaggctggaccccacctacctgaagcacagccaccaggacagcggcctgatcaccgactacaggcactggcagatccccctgggcaggaggttcaggagcctgaagatgtggttcgtgttcaggatgtacggcgtgaagggcctgcaggcctacatcaggaagcacgtgcagctgagccacgagttcgagagcctggtgaggcaggaccccaggttcgagatctgcgtggaggtgatcctgggcctggtgtgcttcaggctgaagggcagcaacaaggtgaacgaggccctgctgcagaggatcaacagcgccaagaagatccacctggtgccctgccacctgagggacaagttcgtgctgaggttcgccatctgcagcaggaccgtggagagcgcccacgtgcagagggcctgggagcacatcaaggagctggccgccgacgtgctgagggccgagagggagtgagctgctcgagagatctacgggtggcatccctgtgacccctccccagtgcctctcctggccctggaagttgccactccagtgcccaccagccttgtcctaataaaattaagttgcatcattttgtctgactaggtgtccttctataatattatggggtggaggggggtggtatggagcaaggggcaagttgggaagacaacctgtagggcctgcggggtctattgggaaccaagctggagtgcagtggcacaatcttggctcactgcaatctccgcctcctgggttcaagcgattctcctgcctcagcctcccgagttgttgggattccaggcatgcatgaccaggctcagctaatttttgtttttttggtagagacggggtttcaccatattggccaggctggtctccaactcctaatctcaggtgatctacccaccttggcctcccaaattgctgggattacaggcgtgaaccactgctcccttccctgtccttctgattttgtaggtaaccacgtgcggaccgagcggccgcagttaattaagctcgcgaaggaacccctagtgatggagttggccactccctctctgcgcgctcgctcgctcactgaggccgggcgaccaaaggtcgcccgacgcccgggctttgcccgggcggcctcagtgagcgagcgagcgcgcagagagggagtggccaagacgatttaaatggtaccgagctcgaattcactggccgtcgttttacaacgtcgtgactgggaaaaccctggcgttacccaacttaatcgccttgcagcacatccccctttcgccagctggcgtaatagcgaagaggcccgcaccgatcgcccttcccaacagttgcgcagcctgaatggcgaatggcgcctgatgcggtattttctccttacgcatctgtgcggtatttcacaccgcatatggtgcactctcagtacaatctgctctgatgccgcatagttaagccagccccgacacccgccaacacccgctgacgcgccctgacgggcttgtctgctcccggcatccgcttacagacaagctgtgaccgtctccgggagctgcatgtgtcagaggttttcaccgtcatcaccgaaacgcgcgatgcagctctggcccgtgtctcaaaatctctgatgttacattgcacaagataaaaatatatcatcatgaacaataaaactgtctgcttacataaacagtaatacaaggggtgttgaagatcctttgatcttttctacggggtctgacgctcagtggaacgaaaactcacgttaagggattttggtcatgagattatcaaaaaggatcttcacctagatccttttaaattaaaaatgaagttttaaatcaagcccaatctgaataatgttacaaccaattaaccaattctgattagaaaaactcatcgagcatcaaatgaaactgcaatttattcatatcaggattatcaataccatatttttgaaaaagccgtttctgtaatgaaggagaaaactcaccgaggcagttccataggatggcaagatcctggtatcggtctgcgattccgactcgtccaacatcaatacaacctattaatttcccctcgtcaaaaataaggttatcaagtgagaaatcaccatgagtgacgactgaatccggtgagaatggcaaaagtttatgcatttctttccagacttgttcaacaggccagccattacgctcgtcatcaaaatcactcgcatcaaccaaaccgttattcattcgtgattgcgcctgagcgagacgaaatacgcgatcgctgttaaaaggacaattacaaacaggaatcgaatgcaaccggcgcaggaacactgccagcgcatcaacaatattttcacctgaatcaggatattcttctaatacctggaatgctgtttttccggggatcgcagtggtgagtaaccatgcatcatcaggagtacggataaaatgcttgatggtcggaagaggcataaattccgtcagccagtttagtctgaccatctcatctgtaacatcattggcaacgctacctttgccatgtttcagaaacaactctggcgcatcgggcttcccatacaagcgatagattgtcgcacctgattgcccgacattatcgcgagcccatttatacccatataaatcagcatccatgttggaatttaatcgcggcctcgacgtttcccgttgaatatggctcataacaccccttgtattactgtttatgtaagcagacagttttattgttcatgatgatatatttttatcttgtgcaatgtaacatcagagattttgagacacgggccagagctgcatcgcgcgttttcagaattggttaattggttgtaacattattcagattgggcttgatttaaaacttcatttttaatttaaaaggatctaggtgaagatcctttttgataatctcatgaccaaaatcccttaacgtgagttttcgttccactgagcgtcagaccccgtagaaaagatcaaaggatcttctttccataggctccgcccccctgacgagcatcacaaaaatcgacgctcaagtcagaggtggcgaaacccgacaggactataaagataccaggcgtttccccctggaagctccctcgtgcgctctcctgttccgaccctgccgcttaccggatacctgtccgcctttctcccttcgggaagcgtggcgctttctcatagctcacgctgtaggtatctcagttcggtgtaggtcgttcgctccaagctgggctgtgtgcacgaaccccccgttcagcccgaccgctgcgccttatccggtaactatcgtcttgagtccaacccggtaagacacgacttatcgccactggcagcagccactggtaacaggattagcagagcgaggtatgtaggcggtgctacagagttcttgaagtggtggcctaactacggctacactagaagaacagtatttggtatctgcgctctgctgaagccagttaccttcggaaaaagagttggtagctcttgatccggcaaacaaaccaccgctggtagcggtggtttttttgtttgcaagcagcagattacgcgcagaaaaaaaggatctcaaaacgccagcaacgcggcctttttacggttcctggccttttgctggccttttgctcacatgttctttcctgcgttatcccctgattctgtggataaccgtattaccgcctttgagtgagctgataccgctcgccgcagccgaacgaccgagcgcagcgagtcagtgagcgaggaagcggaagagcgcccaatacgcaaaccgcctctc

SEQ ID NO: 9 - DNA, 6442 bp, Artificial Sequence
  Description of Artificial Sequence: Synthetic polynucleotide
cccgcgcgttggccgattcattaatgcagctggcacgacaggtttcccgactggaaagcgggcagtgagcgcaacgcaattttcacacaggaaacagctatgaccatgattacgccaagcttgcatgcatttaaatgacgcagctgcgcgctcgctcgctcactgaggccgcccgggcaaagcccgggcgtcgggcgacctttggtcgcccggcctcagtgagcgagcgagcgcgcagagagggagtggccaactccatcactaggggttgagtttaaacttcgtcgacgatctgcggccgcacgcgtggagctagttattaatagtaatcaattacggggtcattagttcatagcccatatatggagttccgcgttacataacttacggtaaatggcccgcctggctgaccgcccaacgacccccgcccattgacgtcaataatgacgtatgttcccatagtaacgtcaatagggactttccattgacgtcaatgggtggagtatttacggtaaactgcccacttggcagtacatcaagtgtatcatatgccaagtacgccccctattgacgtcaatgacggtaaatggcccgcctggcattatgcccagtacatgaccttatgggactttcctacttggcagtacatctacgtattagtcatcgctattaccatggtgatgcggttttggcagtacatcaatgggcgtggatagcggtttgactcacggggatttccaagtctccaccccattgacgtcaatgggagtttgttttgcaccaaaatcaacgggactttccaaaatgtcgtaacaactccgccccattgacgcaaatgggcggtaggcgtgtacggtgggaggtctatataagcagagctcgtttagtgaaccgtcagatcgcctggagacgccatccacgctgttttgacctccatagaagacaccgggaccgatccagcctccgcggattcgaatcccggccgggaacggtgcattggaacgcggattccccgtgccaagagtgacgtaagtaccgcctatagagtctataggcccacaaaaaatgctttcttcttttaatatacttttttgtttatcttatttctaatactttccctaatctctttctttcagggcaataatgatacaatgtatcatgcctctttgcaccattctaaagaataacagtgataatttctgggttaaggcaatagcaatatttctgcatataaatatttctgcatataaattgtaactgatgtaagaggtttcatattgctaatagcagctacaatccagctaccattctgcttttattttatggttgggataaggctggattattctgagtccaagctaggcccttttgctaatcatgttcatacctcttatcttcctcccacagctcctgggcaacgtgctggtctgtgtgctggcccatcactttggcaaagaattgggattcgaacatcgaattcgggcacgagggaggacagagagcaagtcactcccggctgcctttttcacctctgacagagcccagacaccatgaacgcaagtgaattccgaaggagagggaaggagatggtggattacgtggccaactacatggaaggcattgagggacgccaggtctaccctgacgtggagcccgggtacctgcggccgctgatccctgccgctgcccctcaggagccagacacgtttgaggacatcatcaacgacgttgagaagataatcatgcctggggtgacgcactggcacagcccctacttcttcgcctacttccccactgccagctcgtacccggccatgcttgcggacatgctgtgcggggccattggctgcatcggcttctcctgggcggcaagcccagcatgcacagagctggagactgtgatgatggactggctcgggaagatgctggaactaccaaaggcatttttgaatgagaaagctggagaagggggaggagtgatccagggaagtgccagtgaagccaccctggtggccctgctggccgctcggaccaaagtgatccatcggctgcaggcagcgtccccagagctcacacaggccgctatcatggagaagctggtggcttactcatccgatcaggcacactcctcagtggaaagagctgggttaattggtggagtgaaattaaaagccatcccctcagatggcaacttcgccatgcgtgcgtctgccctgcaggaagccctggagagagacaaagcggctggcctgattcctttctttatggttgccaccctggggaccacaacatgctgctcctttgacaatctcttagaagtcggtcctatctgcaacaaggaagacatatggctgcacgttgatgcagcctacgcaggcagtgcattcatctgccctgagttccggcaccttctgaatggagtggagtttgcagattcattcaactttaatccccacaaatggctattggtgaattttgactgttctgccatgtgggtgaaaaagagaacagacttaacgggagcctttagactggaccccacttacctgaagcacagccatcaggattcagggcttatcactgactaccggcattggcagataccactgggcagaagatttcgctctttgaaaatgtggtttgtatttaggatgtatggagtcaaaggactgcaggcttatatccgcaagcatgtccagctgtcccatgagtttgagtcactggtgcgccaggatccccgctttgaaatctgtgtggaagtcattctggggcttgtctgctttcggctaaagggttccaacaaagtgaatgaagctcttctgcaaagaataaacagtgccaaaaaaatccacttggttccatgtcacctcagggacaagtttgtcctgcgctttgccatctgttctcgcacggtggaatctgcccatgtgcagcgggcctgggaacacatcaaagagctggcggccgacgtgctgcgagcagagagggagtaggagtgaagccagctgcaggaatcaaaaattgaagagagatatatctgaaaactggaataagaagcaaataaatatcatcctgccttcatggaactcagctgtctgtggcttcccatgtctttctccaaagttatccagagggttgtgattttgtctgcttagtatctcatcaacaaagaaatattatttgctaattaaaaagttaatcttcatggccatagcttttattcattagctgtgatttttgttgattaaaacattatagattttcatgttcttgcagtcatcagaagtggtaggaaagcctcactgatatattttccagggcaatcaatgttcacgcaacttgaaattatatctgtggtcttcaaattgtcttttgtcatgtggctaaatgcctaataaacaattcaagtgaaatactaaaaaaaaaaaaaaaaaaaaaagctgctcgagagatctacgggtggcatccctgtgacccctccccagtgcctctcctggccctggaagttgccactccagtgcccaccagccttgtcctaataaaattaagttgcatcattttgtctgactaggtgtccttctataatattatggggtggaggggggtggtatggagcaaggggcaagttgggaagacaacctgtagggcctgcggggtctattgggaaccaagctggagtgcagtggcacaatcttggctcactgcaatctccgcctcctgggttcaagcgattctcctgcctcagcctcccgagttgttgggattccaggcatgcatgaccaggctcagctaatttttgtttttttggtagagacggggtttcaccatattggccaggctggtctccaactcctaatctcaggtgatctacccaccttggcctcccaaattgctgggattacaggcgtgaaccactgctcccttccctgtccttctgattttgtaggtaaccacgtgcggaccgagcggccgcagttaattaagctcgcgaaacccctagtgatggagttggccactccctctctgcgcgctcgctcgctcactgaggccgggcgaccaaaggtcgcccgacgcccgggctttgcccgggcggcctcagtgagcgagcgagcgcgcagctggacgatttaaatggtaccgagctcgaattcactggccgtcgttttacaacgtcgtgactgggaaaaccctggcgttacccaacttaatcgccttgcagcacatccccctttcgccagctggcgtaatagcgaagaggcccgcaccgatcgcccttcccaacagttgcgcagcctgaatggcgaatggcgcctgatgcggtattttctccttacgcatctgtgcggtatttcacaccgcatatggtgcactctcagtacaatctgctctgatgccgcatagttaagccagccccgacacccgccaacacccgctgacgcgccctgacgggcttgtctgctcccggcatccgcttacagacaagctgtgaccgtctccgggagctgcatgtgtcagaggttttcaccgtcatcaccgaaacgcgcgatgcagctctggcccgtgtctcaaaatctctgatgttacattgcacaagataaaaatatatcatcatgaacaataaaactgtctgcttacataaacagtaatacaaggggtgttatgagccatattcaacgggaaacgtcgaggccgcgattaaattccaacatggatgctgatttatatgggtataaatgggctcgcgataatgtcgggcaatcaggtgcgacaatctatcgcttgtatgggaagcccgatgcgccagagttgtttctgaaacatggcaaaggtagcgttgccaatgatgttacagatgagatggtcagactaaactggctgacggaatttatgcctcttccgaccatcaagcattttatccgtactcctgatgatgcatggttactcaccactgcgatccccggaaaaacagcattccaggtattagaagaatatcctgattcaggtgaaaatattgttgatgcgctggcagtgttcctgcgccggttgcattcgattcctgtttgtaattgtccttttaacagcgatcgcgtatttcgtctcgctcaggcgcaatcacgaatgaataacggtttggttgatgcgagtgattttgatgacgagcgtaatggctggcctgttgaacaagtctggaaagaaatgcataaacttttgccattctcaccggattcagtcgtcactcatggtgatttctcacttgataaccttatttttgacgaggggaaattaataggttgtattgatgttggacgagtcggaatcgcagaccgataccaggatcttgccatcctatggaactgcctcggtgagttttctccttcattacagaaacggctttttcaaaaatatggtattgataatcctgatatgaataaattgcagtttcatttgatgctcgatgagtttttctaatcagaattggttaattggttgtaacattattcagattgggcttgatttaaaacttcatttttaatttaaaaggatctaggtgaagatcctttttgataatctcatgaccaaaatcccttaacgtgagttttcgttccactgagcgtcagaccccgtagaaaagatcaaaggatcttcttgagatcctttttttctgcgcgtaatctgctgcttgcaaacaaaaaaaccaccgctaccagcggtggtttgtttgccggatcaagagctaccaactctttttccgaaggtaactggcttcagcagagcgcagataccaaatactgttcttctagtgtagccgtagttaggccaccacttcaagaactctgtagcaccgcctacatacctcgctctgctaatcctgttaccagtggctgctgccagtggcgataagtcgtgtcttaccgggttggactcaagacgatagttaccggataaggcgcagcggtcgggctgaacggggggttcgtgcacacagcccagcttggagcgaacgacctacaccgaactgagatacctacagcgtgagctatgagaaagcgccacgcttcccgaagggagaaaggcggacaggtatccggtaagcggcagggtcggaacaggagagcgcacgagggagcttccagggggaaacgcctggtatctttatagtcctgtcgggtttcgccacctctgacttgagcgtcgatttttgtgatgctcgtcaggggggcggagcctatggaaaaacgccagcaacgcggcctttttacggttcctggccttttgctggccttttgctcacatgttctttcctgcgttatcccctgattctgtggataaccgtattaccgcctttgagtgagctgataccgctcgccgcagccgaacgaccgagcgcagcgagtcagtgagcgaggaagcggaagagcgcccaatacgcaaaccgcctctc

SEQ ID NO: 10 - DNA, 9260 bp, Artificial Sequence
  Description of Artificial Sequence: Synthetic polynucleotide
cccgcgcgttggccgattcattaatgcagctggcacgacaggtttcccgactggaaagcgggcagtgagcgcaacgcaattttcacacaggaaacagctatgaccatgattacgccaagcttgcatgcatttaaatgacgttggccactccctctctgcgcgctcgctcgctcactgaggccgggcgaccaaaggtcgcccgacgcccgggctttgcccgggcggcctcagtgagcgagcgagcgcgcagagagggagtggccaactccatcactaggggttcctgagtttaaacttcgtcgacgatctgcggccgcacgcgtggagctagttattaatagtaatcaattacggggtcattagttcatagcccatatatggagttccgcgttacataacttacggtaaatggcccgcctggctgaccgcccaacgacccccgcccattgacgtcaataatgacgtatgttcccatagtaacgtcaatagggactttccattgacgtcaatgggtggagtatttacggtaaactgcccacttggcagtacatcaagtgtatcatatgccaagtacgccccctattgacgtcaatgacggtaaatggcccgcctggcattatgcccagtacatgaccttatgggactttcctacttggcagtacatctacgtattagtcatcgctattaccatggtgatgcggttttggcagtacatcaatgggcgtggatagcggtttgactcacggggatttccaagtctccaccccattgacgtcaatgggagtttgttttgcaccaaaatcaacgggactttccaaaatgtcgtaacaactccgccccattgacgcaaatgggcggtaggcgtgtacggtgggaggtctatataagcagagctcgtttagtgaaccgtcagatcgcctggagacgccatccacgctgttttgacctccatagaagacaccgggaccgatccagcctccgcggattcgaatcccggccgggaacggtgcattggaacgcggattccccgtgccaagagtgacgtaagtaccgcctatagagtctataggcccacaaaaaatgctttcttcttttaatatacttttttgtttatcttatttctaatactttccctaatctctttctttcagggcaataatgatacaatgtatcatgcctctttgcaccattctaaagaataacagtgataatttctgggttaaggcaatagcaatatttctgcatataaatatttctgcatataaattgtaactgatgtaagaggtttcatattgctaatagcagctacaatccagctaccattctgcttttattttatggttgggataaggctggattattctgagtccaagctaggcccttttgctaatcatgttcatacctcttatcttcctcccacagctcctgggcaacgtgctggtctgtgtgctggcccatcactttggcaaagaattgggattcgaacatcggccgccaccatgaacgccagcgagttcaggaggaggggcaaggagatggtggactacgtggccaactacatggagggcatcgagggcaggcaggtgtaccccgacgtggagcccggctacctgaggcccctgatccccgccgccgccccccaggagcccgacaccttcgaggacatcatcaacgacgtggagaagatcatcatgcccggcgtgacccactggcacagcccctacttcttcgcctacttccccaccgccagcagctaccccgccatgctggccgacatgctgtgcggcgccatcggctgcatcggcttcagctgggccgccagccccgcctgcaccgagctggagaccgtgatgatggactggctgggcaagatgctggagctgcccaaggccttcctgaacgagaaggccggcgagggcggcggcgtgatccagggcagcgccagcgaggccaccctggtggccctgctggccgccaggaccaaggtgatccacaggctgcaggccgccagccccgagctgacccaggccgccatcatggagaagctggtggcctacagcagcgaccaggcccacagcagcgtggagagggccggcctgatcggcggcgtgaagctgaaggccatccccagcgacggcaacttcgccatgagggccagcgccctgcaggaggccctggagagggacaaggccgccggcctgatccccttcttcatggtggccaccctgggcaccaccacctgctgcagcttcgacaacctgctggaggtgggccccatctgcaacaaggaggacatctggctgcacgtggacgccgcctacgccggcagcgccttcatctgccccgagttcaggcacctgctgaacggcgtggagttcgccgacagcttcaacttcaacccccacaagtggctgctggtgaacttcgactgcagcgccatgtgggtgaagaagaggaccgacctgaccggcgccttcaggctggaccccacctacctgaagcacagccaccaggacagcggcctgatcaccgactacaggcactggcagatccccctgggcaggaggttcaggagcctgaagatgtggttcgtgttcaggatgtacggcgtgaagggcctgcaggcctacatcaggaagcacgtgcagctgagccacgagttcgagagcctggtgaggcaggaccccaggttcgagatctgcgtggaggtgatcctgggcctggtgtgcttcaggctgaagggcagcaacaaggtgaacgaggccctgctgcagaggatcaacagcgccaagaagatccacctggtgccctgccacctgagggacaagttcgtgctgaggttcgccatctgcagcaggaccgtggagagcgcccacgtgcagagggcctgggagcacatcaaggagctggccgccgacgtgctgagggccgagagggagtgagctgctcgagagatctacgggtggcatccctgtgacccctccccagtgcctctcctggccctggaagttgccactccagtgcccaccagccttgtcctaataaaattaagttgcatcattttgtctgactaggtgtccttctataatattatggggtggaggggggtggtatggagcaaggggcaagttgggaagacaacctgtagggcctgcggggtctattgggaaccaagctggagtgcagtggcacaatcttggctcactgcaatctccgcctcctgggttcaagcgattctcctgcctcagcctcccgagttgttgggattccaggcatgcatgaccaggctcagctaatttttgtttttttggtagagacggggtttcaccatattggccaggctggtctccaactcctaatctcaggtgatctacccaccttggcctcccaaattgctgggattacaggcgtgaaccactgctcccttccctgtccttctgattttgtaggtaaccacgtgcggaccgagcggccgcagttaattaagctcgcgaaggaacccctagtgatggagttggccactccctctctgcgcgctcgctcgctcactgaggccgggcgaccaaaggtcgcccgacgcccgggctttgcccgggcggcctcagtgagcgagcgagcgcgcagagagggagtggccaagacgatttaaatggtaccgagctcgaattcactggccgtcgttttacaacgtcgtgactgggaaaaccctggcgttacccaacttaatcgccttgcagcacatccccctttcgccagctggcgtaatagcgaagaggcccgcaccgatcgcccttcccaacagttgcgcagcctgaatggcgaatggcgcctgatgcggtattttctccttacgcatctgtgcggtatttcacaccgcatatggtgcactctcagtacaatctgctctgatgccgcatagttaagccagccccgacacccgccaacacccgctgacgcgccctgacgggcttgtctgctcccggcatccgcttacagacaagctgtgaccgtctcagaacccaaatgtgaccaaccgtttacatatatcttggtttattatttcaatttctcttttcaaacatcttcttctgtcgttgtgcaattttccaaatgccaatttggtcgcttggctatttccaaacgatttcatatattcaagttggagatatagacagtcccctgaacacctcgcatcctctgctttttatgcctgctcgtcctgtgggtataattttaatggtcaaatcgctgctggggaattgtatacgctgctcttgtgtctcactgcctcccttgtagaaatggaaattgcttttccattatttccatgtgattttgttggttttgccatcgaattggcattgaaaacgcataaaaataagcatttcgcatttgcaaagatccaaaagatttatttgcacgctgagcctggggatacacgaaatgtatttgtaagattcttcagatgagtttggaacgcacggaaattaccgtcttgggatttgttggacatcgcatttaagcatgatgtatcatttaattttttccaatttaaaaacaaataatcagtgctacgattaagactggatctattatagacttcttcaaagtttttcagttttctttaaaattacctccataaaactcttttaatattttgaaaatcatctccaggttacatttaatctgattaagtttagagtcagttagtttcccacagttttcttcttgaaataaacccattaagtaaccccaactgatcggcgcaaatgattcagctatgcagaaaatatgattgatgatttttccctcccaccagcccttaacacttgcttaacccttttgtgtggccattatagccctttcctcgtagtctgcttaaagttcattaataagttttgcgtgagccaaaaatggcgccgctttggaatcgtgacagcgtggaaactctggactttggggttgcaaaacttcggaagctgaaagcattttgctgtagccatcgcattttgggggaagaaatccgaattcgagtccaaaccgaattctaatagaagttttgcagcaaagtgcctcagacaggttaatgaccaaaagcagttttgcattcaaatgctgcagcaaccctcgcacgagggttgtcatgacggacgaaaatctaatttacaacatgcaactgccactttgaggggtgacttttacccaagacgtggctgtgaaggaaattctgcgagaaagagattaattacgctctgggggcagttaatgaatgcttgcgcggggcgataaggggttaacgtttggccagctcaaattaccgaatgtataacattttgatgagcatgacaaaaattggaattttcaactcttttttcctgcgaaaagcataacttttccattaacacaatggcgacgatgagccggcaaatcgacgataccaaatcggcataacgtgcatgaaaattatacatgattgatttcatattaatttctacgaatgttatgaatcggctaaaagatgagaatggaaatattgcacgattttgattttgtcatgatgacaaaaaagggttgtaagatttgtacatgccaaaatcataaacttttaacagaaatcaaacacaaagaagtaatataacattaaagtacacaggccttgtcacagagatagaaaaatgtagctattattaaaatatttaacattctcttggtgtctgcaacttttctatcagtcgcttttttattccctttccaacacttatttaaaatgaaatgcactcgaaattaactaatttaatggctcatatcctttgtgctgcttaaaaaggcaggaaacgttttttgtgccctacacctcctccattcaaatgaaaaaggcggtggagtcgaggaaaatgtctgccctggagcttgacaagccaagatatggcccatcaaaaatgttcgaatgttctttttaaataaatgtctcattatatggctgccacgcccacaccgctcaacgcccacacacgtgccgccttccggtttagttgggtggtacctgaccgtagatttttcactgcggacatgtgtccaatcagtggcaacgtgcaacgaaccgtggcaaacacagggaaagaacctcgaagacccacagcaaactcatcctctcgaatttgacactatgataatgcttatattcaattttttgcaacattctatttacactaaactgagaaacaggacaaagttgagaatgggtgctgtgattatttgtcttgtgccaatatatgccctcctgcatataaaatacgagatacaaaaccaaacgaaataagaacgaacaagaaatcagtttaatttcaatgctgatcaaaccaagttgacaactctgttgtatattagctctaataatgacttaaggttcgaaatttaagtaacttccaaaatgggccagataaatactgctaatatcgaatgcaattcaatgaggaaatagtaatcaatcagccaaccctaatgaaattaataatgtaatttaaaactttattccacccattctaataatgaaaatcattaaatatatgtagcaatccaattttgttaatacatattgtatatccctgatttgtcaataccaaagaccagaaaaaacaccatgccaaattccttttattcgttgaaaatcgaaacaactttgaagtattaacctgctggctaaaaaatatgtgtattactaaatataccatgtaatcaaaagttcgaaataaacgtgaaatggcagctccactcgtcagccgtgccacttttcgactaatcaaaatgccttttgaatgcctgagttgaatcaagttggcttaatagttattatcccacgcaagcaaagtcaatggcagagggaaatgcgtagaaattagcacagacttgaatggacgcacgagtgtcgaatggcaggagagtgggaaatgaacggggagttttccaggataaggatgttttcgaagtatcgtaatcatttatagcctccagatacgggagctgcatgtgtcagaggttttcaccgtcatcaccgaaacgcgcgatgcagctctggcccgtgtctcaaaatctctgatgttacattgcacaagataaaaatatatcatcatgaacaataaaactgtctgcttacataaacagtaatacaaggggtgttgaagatcctttgatcttttctacggggtctgacgctcagtggaacgaaaactcacgttaagggattttggtcatgagattatcaaaaaggatcttcacctagatccttttaaattaaaaatgaagttttaaatcaagcccaatctgaataatgttacaaccaattaaccaattctgattagaaaaactcatcgagcatcaaatgaaactgcaatttattcatatcaggattatcaataccatatttttgaaaaagccgtttctgtaatgaaggagaaaactcaccgaggcagttccataggatggcaagatcctggtatcggtctgcgattccgactcgtccaacatcaatacaacctattaatttcccctcgtcaaaaataaggttatcaagtgagaaatcaccatgagtgacgactgaatccggtgagaatggcaaaagtttatgcatttctttccagacttgttcaacaggccagccattacgctcgtcatcaaaatcactcgcatcaaccaaaccgttattcattcgtgattgcgcctgagcgagacgaaatacgcgatcgctgttaaaaggacaattacaaacaggaatcgaatgcaaccggcgcaggaacactgccagcgcatcaacaatattttcacctgaatcaggatattcttctaatacctggaatgctgtttttccggggatcgcagtggtgagtaaccatgcatcatcaggagtacggataaaatgcttgatggtcggaagaggcataaattccgtcagccagtttagtctgaccatctcatctgtaacatcattggcaacgctacctttgccatgtttcagaaacaactctggcgcatcgggcttcccatacaagcgatagattgtcgcacctgattgcccgacattatcgcgagcccatttatacccatataaatcagcatccatgttggaatttaatcgcggcctcgacgtttcccgttgaatatggctcataacaccccttgtattactgtttatgtaagcagacagttttattgttcatgatgatatatttttatcttgtgcaatgtaacatcagagattttgagacacgggccagagctgcatcgcgcgttttcagaattggttaattggttgtaacattattcagattgggcttgatttaaaacttcatttttaatttaaaaggatctaggtgaagatcctttttgataatctcatgaccaaaatcccttaacgtgagttttcgttccactgagcgtcagaccccgtagaaaagatcaaaggatcttctttccataggctccgcccccctgacgagcatcacaaaaatcgacgctcaagtcagaggtggcgaaacccgacaggactataaagataccaggcgtttccccctggaagctccctcgtgcgctctcctgttccgaccctgccgcttaccggatacctgtccgcctttctcccttcgggaagcgtggcgctttctcatagctcacgctgtaggtatctcagttcggtgtaggtcgttcgctccaagctgggctgtgtgcacgaaccccccgttcagcccgaccgctgcgccttatccggtaactatcgtcttgagtccaacccggtaagacacgacttatcgccactggcagcagccactggtaacaggattagcagagcgaggtatgtaggcggtgctacagagttcttgaagtggtggcctaactacggctacactagaagaacagtatttggtatctgcgctctgctgaagccagttaccttcggaaaaagagttggtagctcttgatccggcaaacaaaccaccgctggtagcggtggtttttttgtttgcaagcagcagattacgcgcagaaaaaaaggatctcaaaacgccagcaacgcggcctttttacggttcctggccttttgctggccttttgctcacatgttctttcctgcgttatcccctgattctgtggataaccgtattaccgcctttgagtgagctgataccgctcgccgcagccgaacgaccgagcgcagcgagtcagtgagcgaggaagcggaagagcgcccaatacgcaaaccgcctctc

SEQ ID NO: 11 - DNA, 9665 bp, Artificial Sequence
  Description of Artificial Sequence: Synthetic polynucleotide
cccgcgcgttggccgattcattaatgcagctggcacgacaggtttcccgactggaaagcgggcagtgagcgcaacgcaattttcacacaggaaacagctatgaccatgattacgccaagcttgcatgcatttaaatgacgttggccactccctctctgcgcgctcgctcgctcactgaggccgggcgaccaaaggtcgcccgacgcccgggctttgcccgggcggcctcagtgagcgagcgagcgcgcagagagggagtggccaactccatcactaggggttcctgagtttaaacttcgtcgacgatctgcggccgcacgcgtggagctagttattaatagtaatcaattacggggtcattagttcatagcccatatatggagttccgcgttacataacttacggtaaatggcccgcctggctgaccgcccaacgacccccgcccattgacgtcaataatgacgtatgttcccatagtaacgtcaatagggactttccattgacgtcaatgggtggagtatttacggtaaactgcccacttggcagtacatcaagtgtatcatatgccaagtacgccccctattgacgtcaatgacggtaaatggcccgcctggcattatgcccagtacatgaccttatgggactttcctacttggcagtacatctacgtattagtcatcgctattaccatggtgatgcggttttggcagtacatcaatgggcgtggatagcggtttgactcacggggatttccaagtctccaccccattgacgtcaatgggagtttgttttgcaccaaaatcaacgggactttccaaaatgtcgtaacaactccgccccattgacgcaaatgggcggtaggcgtgtacggtgggaggtctatataagcagagctcgtttagtgaaccgtcagatcgcctggagacgccatccacgctgttttgacctccatagaagacaccgggaccgatccagcctccgcggattcgaatcccggccgggaacggtgcattggaacgcggattccccgtgccaagagtgacgtaagtaccgcctatagagtctataggcccacaaaaaatgctttcttcttttaatatacttttttgtttatcttatttctaatactttccctaatctctttctttcagggcaataatgatacaatgtatcatgcctctttgcaccattctaaagaataacagtgataatttctgggttaaggcaatagcaatatttctgcatataaatatttctgcatataaattgtaactgatgtaagaggtttcatattgctaatagcagctacaatccagctaccattctgcttttattttatggttgggataaggctggattattctgagtccaagctaggcccttttgctaatcatgttcatacctcttatcttcctcccacagctcctgggcaacgtgctggtctgtgtgctggcccatcactttggcaaagaattgggattcgaacatcggccgccaccatgaacgcaagtgaattccgaaggagagggaaggagatggtggattacgtggccaactacatggaaggcattgagggacgccaggtctaccctgacgtggagcccgggtacctgcggccgctgatccctgccgctgcccctcaggagccagacacgtttgaggacatcatcaacgacgttgagaagataatcatgcctggggtgacgcactggcacagcccctacttcttcgcctacttccccactgccagctcgtacccggccatgcttgcggacatgctgtgcggggccattggctgcatcggcttctcctgggcggcaagcccagcatgcacagagctggagactgtgatgatggactggctcgggaagatgctggaactaccaaaggcatttttgaatgagaaagctggagaagggggaggagtgatccagggaagtgccagtgaagccaccctggtggccctgctggccgctcggaccaaagtgatccatcggctgcaggcagcgtccccagagctcacacaggccgctatcatggagaagctggtggcttactcatccgatcaggcacactcctcagtggaaagagctgggttaattggtggagtgaaattaaaagccatcccctcagatggcaacttcgccatgcgtgcgtctgccctgcaggaagccctggagagagacaaagcggctggcctgattcctttctttatggttgccaccctggggaccacaacatgctgctcctttgacaatctcttagaagtcggtcctatctgcaacaaggaagacatatggctgcacgttgatgcagcctacgcaggcagtgcattcatctgccctgagttccggcaccttctgaatggagtggagtttgcagattcattcaactttaatccccacaaatggctattggtgaattttgactgttctgccatgtgggtgaaaaagagaacagacttaacgggagcctttagactggaccccacttacctgaagcacagccatcaggattcagggcttatcactgactaccggcattggcagataccactgggcagaagatttcgctctttgaaaatgtggtttgtatttaggatgtatggagtcaaaggactgcaggcttatatccgcaagcatgtccagctgtcccatgagtttgagtcactggtgcgccaggatccccgctttgaaatctgtgtggaagtcattctggggcttgtctgctttcggctaaagggttccaacaaagtgaatgaagctcttctgcaaagaataaacagtgccaaaaaaatccacttggttccatgtcacctcagggacaagtttgtcctgcgctttgccatctgttctcgcacggtggaatctgcccatgtgcagcgggcctgggaacacatcaaagagctggcggccgacgtgctgcgagcagagagggagtaggagtgaagccagctgcaggaatcaaaaattgaagagagatatatctgaaaactggaataagaagcaaataaatatcatcctgccttcatggaactcagctgtctgtggcttcccatgtctttctccaaagttatccagagggttgtgattttgtctgcttagtatctcatcaacaaagaaatattatttgctaattaaaaagttaatcttcatggccatagcttttattcattagctgtgatttttgttgattaaaacattatagattttcatgttcttgcagtcatcagaagtggtaggaaagcctcactgatatattttccagggcaatcaatgttcacgcaacttgaaattatatctgtggtcttcaaattgtcttttgtcatgtggctaaatgcctaataagctgctcgagagatctacgggtggcatccctgtgacccctccccagtgcctctcctggccctggaagttgccactccagtgcccaccagccttgtcctaataaaattaagttgcatcattttgtctgactaggtgtccttctataatattatggggtggaggggggtggtatggagcaaggggcaagttgggaagacaacctgtagggcctgcggggtctattgggaaccaagctggagtgcagtggcacaatcttggctcactgcaatctccgcctcctgggttcaagcgattctcctgcctcagcctcccgagttgttgggattccaggcatgcatgaccaggctcagctaatttttgtttttttggtagagacggggtttcaccatattggccaggctggtctccaactcctaatctcaggtgatctacccaccttggcctcccaaattgctgggattacaggcgtgaaccactgctcccttccctgtccttctgattttgtaggtaaccacgtgcggaccgagcggccgcagttaattaagctcgcgaaggaacccctagtgatggagttggccactccctctctgcgcgctcgctcgctcactgaggccgggcgaccaaaggtcgcccgacgcccgggctttgcccgggcggcctcagtgagcgagcgagcgcgcagagagggagtggccaagacgatttaaatggtaccgagctcgaattcactggccgtcgttttacaacgtcgtgactgggaaaaccctggcgttacccaacttaatcgccttgcagcacatccccctttcgccagctggcgtaatagcgaagaggcccgcaccgatcgcccttcccaacagttgcgcagcctgaatggcgaatggcgcctgatgcggtattttctccttacgcatctgtgcggtatttcacaccgcatatggtgcactctcagtacaatctgctctgatgccgcatagttaagccagccccgacacccgccaacacccgctgacgcgccctgacgggcttgtctgctcccggcatccgcttacagacaagctgtgaccgtctcagaacccaaatgtgaccaaccgtttacatatatcttggtttattatttcaatttctcttttcaaacatcttcttctgtcgttgtgcaattttccaaatgccaatttggtcgcttggctatttccaaacgatttcatatattcaagttggagatatagacagtcccctgaacacctcgcatcctctgctttttatgcctgctcgtcctgtgggtataattttaatggtcaaatcgctgctggggaattgtatacgctgctcttgtgtctcactgcctcccttgtagaaatggaaattgcttttccattatttccatgtgattttgttggttttgccatcgaattggcattgaaaacgcataaaaataagcatttcgcatttgcaaagatccaaaagatttatttgcacgctgagcctggggatacacgaaatgtatttgtaagattcttcagatgagtttggaacgcacggaaattaccgtcttgggatttgttggacatcgcatttaagcatgatgtatcatttaattttttccaatttaaaaacaaataatcagtgctacgattaagactggatctattatagacttcttcaaagtttttcagttttctttaaaattacctccataaaactcttttaatattttgaaaatcatctccaggttacatttaatctgattaagtttagagtcagttagtttcccacagttttcttcttgaaataaacccattaagtaaccccaactgatcggcgcaaatgattcagctatgcagaaaatatgattgatgatttttccctcccaccagcccttaacacttgcttaacccttttgtgtggccattatagccctttcctcgtagtctgcttaaagttcattaataagttttgcgtgagccaaaaatggcgccgctttggaatcgtgacagcgtggaaactctggactttggggttgcaaaacttcggaagctgaaagcattttgctgtagccatcgcattttgggggaagaaatccgaattcgagtccaaaccgaattctaatagaagttttgcagcaaagtgcctcagacaggttaatgaccaaaagcagttttgcattcaaatgctgcagcaaccctcgcacgagggttgtcatgacggacgaaaatctaatttacaacatgcaactgccactttgaggggtgacttttacccaagacgtggctgtgaaggaaattctgcgagaaagagattaattacgctctgggggcagttaatgaatgcttgcgcggggcgataaggggttaacgtttggccagctcaaattaccgaatgtataacattttgatgagcatgacaaaaattggaattttcaactcttttttcctgcgaaaagcataacttttccattaacacaatggcgacgatgagccggcaaatcgacgataccaaatcggcataacgtgcatgaaaattatacatgattgatttcatattaatttctacgaatgttatgaatcggctaaaagatgagaatggaaatattgcacgattttgattttgtcatgatgacaaaaaagggttgtaagatttgtacatgccaaaatcataaacttttaacagaaatcaaacacaaagaagtaatataacattaaagtacacaggccttgtcacagagatagaaaaatgtagctattattaaaatatttaacattctcttggtgtctgcaacttttctatcagtcgcttttttattccctttccaacacttatttaaaatgaaatgcactcgaaattaactaatttaatggctcatatcctttgtgctgcttaaaaaggcaggaaacgttttttgtgccctacacctcctccattcaaatgaaaaaggcggtggagtcgaggaaaatgtctgccctggagcttgacaagccaagatatggcccatcaaaaatgttcgaatgttctttttaaataaatgtctcattatatggctgccacgcccacaccgctcaacgcccacacacgtgccgccttccggtttagttgggtggtacctgaccgtagatttttcactgcggacatgtgtccaatcagtggcaacgtgcaacgaaccgtggcaaacacagggaaagaacctcgaagacccacagcaaactcatcctctcgaatttgacactatgataatgcttatattcaattttttgcaacattctatttacactaaactgagaaacaggacaaagttgagaatgggtgctgtgattatttgtcttgtgccaatatatgccctcctgcatataaaatacgagatacaaaaccaaacgaaataagaacgaacaagaaatcagtttaatttcaatgctgatcaaaccaagttgacaactctgttgtatattagctctaataatgacttaaggttcgaaatttaagtaacttccaaaatgggccagataaatactgctaatatcgaatgcaattcaatgaggaaatagtaatcaatcagccaaccctaatgaaattaataatgtaatttaaaactttattccacccattctaataatgaaaatcattaaatatatgtagcaatccaattttgttaatacatattgtatatccctgatttgtcaataccaaagaccagaaaaaacaccatgccaaattccttttattcgttgaaaatcgaaacaactttgaagtattaacctgctggctaaaaaatatgtgtattactaaatataccatgtaatcaaaagttcgaaataaacgtgaaatggcagctccactcgtcagccgtgccacttttcgactaatcaaaatgccttttgaatgcctgagttgaatcaagttggcttaatagttattatcccacgcaagcaaagtcaatggcagagggaaatgcgtagaaattagcacagacttgaatggacgcacgagtgtcgaatggcaggagagtgggaaatgaacggggagttttccaggataaggatgttttcgaagtatcgtaatcatttatagcctccagatacgggagctgcatgtgtcagaggttttcaccgtcatcaccgaaacgcgcgatgcagctctggcccgtgtctcaaaatctctgatgttacattgcacaagataaaaatatatcatcatgaacaataaaactgtctgcttacataaacagtaatacaaggggtgttgaagatcctttgatcttttctacggggtctgacgctcagtggaacgaaaactcacgttaagggattttggtcatgagattatcaaaaaggatcttcacctagatccttttaaattaaaaatgaagttttaaatcaagcccaatctgaataatgttacaaccaattaaccaattctgattagaaaaactcatcgagcatcaaatgaaactgcaatttattcatatcaggattatcaataccatatttttgaaaaagccgtttctgtaatgaaggagaaaactcaccgaggcagttccataggatggcaagatcctggtatcggtctgcgattccgactcgtccaacatcaatacaacctattaatttcccctcgtcaaaaataaggttatcaagtgagaaatcaccatgagtgacgactgaatccggtgagaatggcaaaagtttatgcatttctttccagacttgttcaacaggccagccattacgctcgtcatcaaaatcactcgcatcaaccaaaccgttattcattcgtgattgcgcctgagcgagacgaaatacgcgatcgctgttaaaaggacaattacaaacaggaatcgaatgcaaccggcgcaggaacactgccagcgcatcaacaatattttcacctgaatcaggatattcttctaatacctggaatgctgtttttccggggatcgcagtggtgagtaaccatgcatcatcaggagtacggataaaatgcttgatggtcggaagaggcataaattccgtcagccagtttagtctgaccatctcatctgtaacatcattggcaacgctacctttgccatgtttcagaaacaactctggcgcatcgggcttcccatacaagcgatagattgtcgcacctgattgcccgacattatcgcgagcccatttatacccatataaatcagcatccatgttggaatttaatcgcggcctcgacgtttcccgttgaatatggctcataacaccccttgtattactgtttatgtaagcagacagttttattgttcatgatgatatatttttatcttgtgcaatgtaacatcagagattttgagacacgggccagagctgcatcgcgcgttttcagaattggttaattggttgtaacattattcagattgggcttgatttaaaacttcatttttaatttaaaaggatctaggtgaagatcctttttgataatctcatgaccaaaatcccttaacgtgagttttcgttccactgagcgtcagaccccgtagaaaagatcaaaggatcttctttccataggctccgcccccctgacgagcatcacaaaaatcgacgctcaagtcagaggtggcgaaacccgacaggactataaagataccaggcgtttccccctggaagctccctcgtgcgctctcctgttccgaccctgccgcttaccggatacctgtccgcctttctcccttcgggaagcgtggcgctttctcatagctcacgctgtaggtatctcagttcggtgtaggtcgttcgctccaagctgggctgtgtgcacgaaccccccgttcagcccgaccgctgcgccttatccggtaactatcgtcttgagtccaacccggtaagacacgacttatcgccactggcagcagccactggtaacaggattagcagagcgaggtatgtaggcggtgctacagagttcttgaagtggtggcctaactacggctacactagaagaacagtatttggtatctgcgctctgctgaagccagttaccttcggaaaaagagttggtagctcttgatccggcaaacaaaccaccgctggtagcggtggtttttttgtttgcaagcagcagattacgcgcagaaaaaaaggatctcaaaacgccagcaacgcggcctttttacggttcctggccttttgctggccttttgctcacatgttctttcctgcgttatcccctgattctgtggataaccgtattaccgcctttgagtgagctgataccgctcgccgcagccgaacgaccgagcgcagcgagtcagtgagcgaggaagcggaagagcgcccaatacgcaaaccgcctctc

SEQ ID NO: 12 - DNA, 6236 bp, Artificial Sequence
  Description of Artificial Sequence: Synthetic polynucleotide
cccgcgcgttggccgattcattaatgcagctggcacgacaggtttcccgactggaaagcgggcagtgagcgcaacgcaattttcacacaggaaacagctatgaccatgattacgccaagcttgcatgcatttaaatgacgcagctgcgcgctcgctcgctcactgaggccgcccgggcaaagcccgggcgtcgggcgacctttggtcgcccggcctcagtgagcgagcgagcgcgcagagagggagtggccaactccatcactaggggttgagtttaaacttcgtcgacgatctgcggccgcacgcgtggagctagttattaatagtaatcaattacggggtcattagttcatagcccatatatggagttccgcgttacataacttacggtaaatggcccgcctggctgaccgcccaacgacccccgcccattgacgtcaataatgacgtatgttcccatagtaacgtcaatagggactttccattgacgtcaatgggtggagtatttacggtaaactgcccacttggcagtacatcaagtgtatcatatgccaagtacgccccctattgacgtcaatgacggtaaatggcccgcctggcattatgcccagtacatgaccttatgggactttcctacttggcagtacatctacgtattagtcatcgctattaccatggtgatgcggttttggcagtacatcaatgggcgtggatagcggtttgactcacggggatttccaagtctccaccccattgacgtcaatgggagtttgttttgcaccaaaatcaacgggactttccaaaatgtcgtaacaactccgccccattgacgcaaatgggcggtaggcgtgtacggtgggaggtctatataagcagagctcgtttagtgaaccgtcagatcgcctggagacgccatccacgctgttttgacctccatagaagacaccgggaccgatccagcctccgcggattcgaatcccggccgggaacggtgcattggaacgcggattccccgtgccaagagtgacgtaagtaccgcctatagagtctataggcccacaaaaaatgctttcttcttttaatatacttttttgtttatcttatttctaatactttccctaatctctttctttcagggcaataatgatacaatgtatcatgcctctttgcaccattctaaagaataacagtgataatttctgggttaaggcaatagcaatatttctgcatataaatatttctgcatataaattgtaactgatgtaagaggtttcatattgctaatagcagctacaatccagctaccattctgcttttattttatggttgggataaggctggattattctgagtccaagctaggcccttttgctaatcatgttcatacctcttatcttcctcccacagctcctgggcaacgtgctggtctgtgtgctggcccatcactttggcaaagaattgggattcgaacatcggccgccaccatgaacgcaagtgaattccgaaggagagggaaggagatggtggattacgtggccaactacatggaaggcattgagggacgccaggtctaccctgacgtggagcccgggtacctgcggccgctgatccctgccgctgcccctcaggagccagacacgtttgaggacatcatcaacgacgttgagaagataatcatgcctggggtgacgcactggcacagcccctacttcttcgcctacttccccactgccagctcgtacccggccatgcttgcggacatgctgtgcggggccattggctgcatcggcttctcctgggcggcaagcccagcatgcacagagctggagactgtgatgatggactggctcgggaagatgctggaactaccaaaggcatttttgaatgagaaagctggagaagggggaggagtgatccagggaagtgccagtgaagccaccctggtggccctgctggccgctcggaccaaagtgatccatcggctgcaggcagcgtccccagagctcacacaggccgctatcatggagaagctggtggcttactcatccgatcaggcacactcctcagtggaaagagctgggttaattggtggagtgaaattaaaagccatcccctcagatggcaacttcgccatgcgtgcgtctgccctgcaggaagccctggagagagacaaagcggctggcctgattcctttctttatggttgccaccctggggaccacaacatgctgctcctttgacaatctcttagaagtcggtcctatctgcaacaaggaagacatatggctgcacgttgatgcagcctacgcaggcagtgcattcatctgccctgagttccggcaccttctgaatggagtggagtttgcagattcattcaactttaatccccacaaatggctattggtgaattttgactgttctgccatgtgggtgaaaaagagaacagacttaacgggagcctttagactggaccccacttacctgaagcacagccatcaggattcagggcttatcactgactaccggcattggcagataccactgggcagaagatttcgctctttgaaaatgtggtttgtatttaggatgtatggagtcaaaggactgcaggcttatatccgcaagcatgtccagctgtcccatgagtttgagtcactggtgcgccaggatccccgctttgaaatctgtgtggaagtcattctggggcttgtctgctttcggctaaagggttccaacaaagtgaatgaagctcttctgcaaagaataaacagtgccaaaaaaatccacttggttccatgtcacctcagggacaagtttgtcctgcgctttgccatctgttctcgcacggtggaatctgcccatgtgcagcgggcctgggaacacatcaaagagctggcggccgacgtgctgcgagcagagagggagtaggagtgagctgctcgagagatctacgggtggcatccctgtgacccctccccagtgcctctcctggccctggaagttgccactccagtgcccaccagccttgtcctaataaaattaagttgcatcattttgtctgactaggtgtccttctataatattatggggtggaggggggtggtatggagcaaggggcaagttgggaagacaacctgtagggcctgcggggtctattgggaaccaagctggagtgcagtggcacaatcttggctcactgcaatctccgcctcctgggttcaagcgattctcctgcctcagcctcccgagttgttgggattccaggcatgcatgaccaggctcagctaatttttgtttttttggtagagacggggtttcaccatattggccaggctggtctccaactcctaatctcaggtgatctacccaccttggcctcccaaattgctgggattacaggcgtgaaccactgctcccttccctgtccttctgattttgtaggtaaccacgtgcggaccgagcggccgcagttaattaagctcgcgaaacccctagtgatggagttggccactccctctctgcgcgctcgctcgctcactgaggccgggcgaccaaaggtcgcccgacgcccgggctttgcccgggcggcctcagtgagcgagcgagcgcgcagctggacgatttaaatggtaccgagctcgaattcactggccgtcgttttacaacgtcgtgactgggaaaaccctggcgttacccaacttaatcgccttgcagcacatccccctttcgccagctggcgtaatagcgaagaggcccgcaccgatcgcccttcccaacagttgcgcagcctgaatggcgaatggcgcctgatgcggtattttctccttacgcatctgtgcggtatttcacaccgcatatggtgcactctcagtacaatctgctctgatgccgcatagttaagccagccccgacacccgccaacacccgctgacgcgccctgacgggcttgtctgctcccggcatccgcttacagacaagctgtgaccgtctccgggagctgcatgtgtcagaggttttcaccgtcatcaccgaaacgcgcgatgcagctctggcccgtgtctcaaaatctctgatgttacattgcacaagataaaaatatatcatcatgaacaataaaactgtctgcttacataaacagtaatacaaggggtgttgaagatcctttgatcttttctacggggtctgacgctcagtggaacgaaaactcacgttaagggattttggtcatgagattatcaaaaaggatcttcacctagatccttttaaattaaaaatgaagttttaaatcaagcccaatctgaataatgttacaaccaattaaccaattctgattagaaaaactcatcgagcatcaaatgaaactgcaatttattcatatcaggattatcaataccatatttttgaaaaagccgtttctgtaatgaaggagaaaactcaccgaggcagttccataggatggcaagatcctggtatcggtctgcgattccgactcgtccaacatcaatacaacctattaatttcccctcgtcaaaaataaggttatcaagtgagaaatcaccatgagtgacgactgaatccggtgagaatggcaaaagtttatgcatttctttccagacttgttcaacaggccagccattacgctcgtcatcaaaatcactcgcatcaaccaaaccgttattcattcgtgattgcgcctgagcgagacgaaatacgcgatcgctgttaaaaggacaattacaaacaggaatcgaatgcaaccggcgcaggaacactgccagcgcatcaacaatattttcacctgaatcaggatattcttctaatacctggaatgctgtttttccggggatcgcagtggtgagtaaccatgcatcatcaggagtacggataaaatgcttgatggtcggaagaggcataaattccgtcagccagtttagtctgaccatctcatctgtaacatcattggcaacgctacctttgccatgtttcagaaacaactctggcgcatcgggcttcccatacaagcgatagattgtcgcacctgattgcccgacattatcgcgagcccatttatacccatataaatcagcatccatgttggaatttaatcgcggcctcgacgtttcccgttgaatatggctcataacaccccttgtattactgtttatgtaagcagacagttttattgttcatgatgatatatttttatcttgtgcaatgtaacatcagagattttgagacacgggccagagctgcatcgcgcgttttcagaattggttaattggttgtaacattattcagattgggcttgatttaaaacttcatttttaatttaaaaggatctaggtgaagatcctttttgataatctcatgaccaaaatcccttaacgtgagttttcgttccactgagcgtcagaccccgtagaaaagatcaaaggatcttctttccataggctccgcccccctgacgagcatcacaaaaatcgacgctcaagtcagaggtggcgaaacccgacaggactataaagataccaggcgtttccccctggaagctccctcgtgcgctctcctgttccgaccctgccgcttaccggatacctgtccgcctttctcccttcgggaagcgtggcgctttctcatagctcacgctgtaggtatctcagttcggtgtaggtcgttcgctccaagctgggctgtgtgcacgaaccccccgttcagcccgaccgctgcgccttatccggtaactatcgtcttgagtccaacccggtaagacacgacttatcgccactggcagcagccactggtaacaggattagcagagcgaggtatgtaggcggtgctacagagttcttgaagtggtggcctaactacggctacactagaagaacagtatttggtatctgcgctctgctgaagccagttaccttcggaaaaagagttggtagctcttgatccggcaaacaaaccaccgctggtagcggtggtttttttgtttgcaagcagcagattacgcgcagaaaaaaaggatctcaaaacgccagcaacgcggcctttttacggttcctggccttttgctggccttttgctcacatgttctttcctgcgttatcccctgattctgtggataaccgtattaccgcctttgagtgagctgataccgctcgccgcagccgaacgaccgagcgcagcgagtcagtgagcgaggaagcggaagagcgcccaatacgcaaaccgcctctc

SEQ ID NO: 13 - DNA, 3535 bp, Artificial Sequence
  Description of Artificial Sequence: Synthetic polynucleotide
ctgcgcgctcgctcgctcactgaggccgcccgggcaaagcccgggcgtcgggcgacctttggtcgcccggcctcagtgagcgagcgagcgcgcagagagggagtggccaactccatcactaggggttccttgtagttaatgattaacccgccatgctacttatctacgtagccatgctctagagcggccgcacgcgtggagctagttattaatagtaatcaattacggggtcattagttcatagcccatatatggagttccgcgttacataacttacggtaaatggcccgcctggctgaccgcccaacgacccccgcccattgacgtcaataatgacgtatgttcccatagtaacgtcaatagggactttccattgacgtcaatgggtggagtatttacggtaaactgcccacttggcagtacatcaagtgtatcatatgccaagtacgccccctattgacgtcaatgacggtaaatggcccgcctggcattatgcccagtacatgaccttatgggactttcctacttggcagtacatctacgtattagtcatcgctattaccatggtgatgcggttttggcagtacatcaatgggcgtggatagcggtttgactcacggggatttccaagtctccaccccattgacgtcaatgggagtttgttttgcaccaaaatcaacgggactttccaaaatgtcgtaacaactccgccccattgacgcaaatgggcggtaggcgtgtacggtgggaggtctatataagcagagctcgtttagtgaaccgtcagatcgcctggagacgccatccacgctgttttgacctccatagaagacaccgggaccgatccagcctccgcggattcgaatcccggccgggaacggtgcattggaacgcggattccccgtgccaagagtgacgtaagtaccgcctatagagtctataggcccacaaaaaatgctttcttcttttaatatacttttttgtttatcttatttctaatactttccctaatctctttctttcagggcaataatgatacaatgtatcatgcctctttgcaccattctaaagaataacagtgataatttctgggttaaggcaatagcaatatttctgcatataaatatttctgcatataaattgtaactgatgtaagaggtttcatattgctaatagcagctacaatccagctaccattctgcttttattttatggttgggataaggctggattattctgagtccaagctaggcccttttgctaatcatgttcatacctcttatcttcctcccacagctcctgggcaacgtgctggtctgtgtgctggcccatcactttggcaaagaattgggattcgaacatcggccgccaccatgaacgcaagtgaattccgaaggagagggaaggagatggtggattacgtggccaactacatggaaggcattgagggacgccaggtctaccctgacgtggagcccgggtacctgcggccgctgatccctgccgctgcccctcaggagccagacacgtttgaggacatcatcaacgacgttgagaagataatcatgcctggggtgacgcactggcacagcccctacttcttcgcctacttccccactgccagctcgtacccggccatgcttgcggacatgctgtgcggggccattggctgcatcggcttctcctgggcggcaagcccagcatgcacagagctggagactgtgatgatggactggctcgggaagatgctggaactaccaaaggcatttttgaatgagaaagctggagaagggggaggagtgatccagggaagtgccagtgaagccaccctggtggccctgctggccgctcggaccaaagtgatccatcggctgcaggcagcgtccccagagctcacacaggccgctatcatggagaagctggtggcttactcatccgatcaggcacactcctcagtggaaagagctgggttaattggtggagtgaaattaaaagccatcccctcagatggcaacttcgccatgcgtgcgtctgccctgcaggaagccctggagagagacaaagcggctggcctgattcctttctttatggttgccaccctggggaccacaacatgctgctcctttgacaatctcttagaagtcggtcctatctgcaacaaggaagacatatggctgcacgttgatgcagcctacgcaggcagtgcattcatctgccctgagttccggcaccttctgaatggagtggagtttgcagattcattcaactttaatccccacaaatggctattggtgaattttgactgttctgccatgtgggtgaaaaagagaacagacttaacgggagcctttagactggaccccacttacctgaagcacagccatcaggattcagggcttatcactgactaccggcattggcagataccactgggcagaagatttcgctctttgaaaatgtggtttgtatttaggatgtatggagtcaaaggactgcaggcttatatccgcaagcatgtccagctgtcccatgagtttgagtcactggtgcgccaggatccccgctttgaaatctgtgtggaagtcattctggggcttgtctgctttcggctaaagggttccaacaaagtgaatgaagctcttctgcaaagaataaacagtgccaaaaaaatccacttggttccatgtcacctcagggacaagtttgtcctgcgctttgccatctgttctcgcacggtggaatctgcccatgtgcagcgggcctgggaacacatcaaagagctggcggccgacgtgctgcgagcagagagggagtaggagtgagctgctcgagagatctacgggtggcatccctgtgacccctccccagtgcctctcctggccctggaagttgccactccagtgcccaccagccttgtcctaataaaattaagttgcatcattttgtctgactaggtgtccttctataatattatggggtggaggggggtggtatggagcaaggggcaagttgggaagacaacctgtagggcctgcggggtctattgggaaccaagctggagtgcagtggcacaatcttggctcactgcaatctccgcctcctgggttcaagcgattctcctgcctcagcctcccgagttgttgggattccaggcatgcatgaccaggctcagctaatttttgtttttttggtagagacggggtttcaccatattggccaggctggtctccaactcctaatctcaggtgatctacccaccttggcctcccaaattgctgggattacaggcgtgaaccactgctcccttccctgtccttctgattttgtaggtaaccccggaccacgtgcggaccgagcggccgctctagagcatggctacgtagataagtagcatggcgggttaatcattaactacaaggaacccctagtgatggagttggccactccctctctgcgcgctcgctcgctcactgaggccgggcgaccaaaggtcgcccgacgcccgggcggcctcagtgagcgagcgagcgcgcag

SEQ ID NO: 14 - DNA, 3534 bp, Artificial Sequence
  Description of Artificial Sequence: Synthetic polynucleotide
ctgcgcgctcgctcgctcactgaggccgcccgggcaaagcccgggcgtcgggcgacctttggtcgcccggcctcagtgagcgagcgagcgcgcagagagggagtggccaactccatcactaggggttccttgtagttaatgattaacccgccatgctacttatctacgtagccatgctctagagcggccgcacgcgtggagctagttattaatagtaatcaattacggggtcattagttcatagcccatatatggagttccgcgttacataacttacggtaaatggcccgcctggctgaccgcccaacgacccccgcccattgacgtcaataatgacgtatgttcccatagtaacgtcaatagggactttccattgacgtcaatgggtggagtatttacggtaaactgcccacttggcagtacatcaagtgtatcatatgccaagtacgccccctattgacgtcaatgacggtaaatggcccgcctggcattatgcccagtacatgaccttatgggactttcctacttggcagtacatctacgtattagtcatcgctattaccatggtgatgcggttttggcagtacatcaatgggcgtggatagcggtttgactcacggggatttccaagtctccaccccattgacgtcaatgggagtttgttttgcaccaaaatcaacgggactttccaaaatgtcgtaacaactccgccccattgacgcaaatgggcggtaggcgtgtacggtgggaggtctatataagcagagctcgtttagtgaaccgtcagatcgcctggagacgccatccacgctgttttgacctccatagaagacaccgggaccgatccagcctccgcggattcgaatcccggccgggaacggtgcattggaacgcggattccccgtgccaagagtgacgtaagtaccgcctatagagtctataggcccacaaaaaatgctttcttcttttaatatacttttttgtttatcttatttctaatactttccctaatctctttctttcagggcaataatgatacaatgtatcatgcctctttgcaccattctaaagaataacagtgataatttctgggttaaggcaatagcaatatttctgcatataaatatttctgcatataaattgtaactgatgtaagaggtttcatattgctaatagcagctacaatccagctaccattctgcttttattttatggttgggataaggctggattattctgagtccaagctaggcccttttgctaatcatgttcatacctcttatcttcctcccacagctcctgggcaacgtgctggtctgtgtgctggcccatcactttggcaaagaattgggattcgaacatcggccgccaccatgaacgccagcgagttcaggaggaggggcaaggagatggtggactacgtggccaactacatggagggcatcgagggcaggcaggtgtaccccgacgtggagcccggctacctgaggcccctgatccccgccgccgccccccaggagcccgacaccttcgaggacatcatcaacgacgtggagaagatcatcatgcccggcgtgacccactggcacagcccctacttcttcgcctacttccccaccgccagcagctaccccgccatgctggccgacatgctgtgcggcgccatcggctgcatcggcttcagctgggccgccagccccgcctgcaccgagctggagaccgtgatgatggactggctgggcaagatgctggagctgcccaaggccttcctgaacgagaaggccggcgagggcggcggcgtgatccagggcagcgccagcgaggccaccctggtggccctgctggccgccaggaccaaggtgatccacaggctgcaggccgccagccccgagctgacccaggccgccatcatggagaagctggtggcctacagcagcgaccaggcccacagcagcgtggagagggccggcctgatcggcggcgtgaagctgaaggccatccccagcgacggcaacttcgccatgagggccagcgccctgcaggaggccctggagagggacaaggccgccggcctgatccccttcttcatggtggccaccctgggcaccaccacctgctgcagcttcgacaacctgctggaggtgggccccatctgcaacaaggaggacatctggctgcacgtggacgccgcctacgccggcagcgccttcatctgccccgagttcaggcacctgctgaacggcgtggagttcgccgacagcttcaacttcaacccccacaagtggctgctggtgaacttcgactgcagcgccatgtgggtgaagaagaggaccgacctgaccggcgccttcaggctggaccccacctacctgaagcacagccaccaggacagcggcctgatcaccgactacaggcactggcagatccccctgggcaggaggttcaggagcctgaagatgtggttcgtgttcaggatgtacggcgtgaagggcctgcaggcctacatcaggaagcacgtgcagctgagccacgagttcgagagcctggtgaggcaggaccccaggttcgagatctgcgtggaggtgatcctgggcctggtgtgcttcaggctgaagggcagcaacaaggtgaacgaggccctgctgcagaggatcaacagcgccaagaagatccacctggtgccctgccacctgagggacaagttcgtgctgaggttcgccatctgcagcaggaccgtggagagcgcccacgtgcagagggcctgggagcacatcaaggagctggccgccgacgtgctgagggccgagagggagtgagctgctcgagagatctacgggtggcatccctgtgacccctccccagtgcctctcctggccctggaagttgccactccagtgcccaccagccttgtcctaataaaattaagttgcatcattttgtctgactaggtgtccttctataatattatggggtggaggggggtggtatggagcaaggggcaagttgggaagacaacctgtagggcctgcggggtctattgggaaccaagctggagtgcagtggcacaatcttggctcactgcaatctccgcctcctgggttcaagcgattctcctgcctcagcctcccgagttgttgggattccaggcatgcatgaccaggctcagctaatttttgtttttttggtagagacggggtttcaccatattggccaggctggtctccaactcctaatctcaggtgatctacccaccttggcctcccaaattgctgggattacaggcgtgaaccactgctcccttccctgtccttctgattttgtaggtaacgtaaccccggaccacgtgcggaccgagcggccgctctagagcatggctacgtagataagtagcatggcgggttaatcattaactacaaggaacccctagtgatggagttggccactccctctctgcgcgctcgctcgctcactgaggccgggcgaccaaaggtcgcccgacgcccgggcggcctcagtgagcgagcgagcgcgcag

SEQ ID NO: 15 - DNA, 3940 bp, Artificial Sequence
  Description of Artificial Sequence: Synthetic polynucleotide
ctgcgcgctcgctcgctcactgaggccgcccgggcaaagcccgggcgtcgggcgacctttggtcgcccggcctcagtgagcgagcgagcgcgcagagagggagtggccaactccatcactaggggttccttgtagttaatgattaacccgccatgctacttatctacgtagccatgctctagagcggccgcacgcgtggagctagttattaatagtaatcaattacggggtcattagttcatagcccatatatggagttccgcgttacataacttacggtaaatggcccgcctggctgaccgcccaacgacccccgcccattgacgtcaataatgacgtatgttcccatagtaacgtcaatagggactttccattgacgtcaatgggtggagtatttacggtaaactgcccacttggcagtacatcaagtgtatcatatgccaagtacgccccctattgacgtcaatgacggtaaatggcccgcctggcattatgcccagtacatgaccttatgggactttcctacttggcagtacatctacgtattagtcatcgctattaccatggtgatgcggttttggcagtacatcaatgggcgtggatagcggtttgactcacggggatttccaagtctccaccccattgacgtcaatgggagtttgttttgcaccaaaatcaacgggactttccaaaatgtcgtaacaactccgccccattgacgcaaatgggcggtaggcgtgtacggtgggaggtctatataagcagagctcgtttagtgaaccgtcagatcgcctggagacgccatccacgctgttttgacctccatagaagacaccgggaccgatccagcctccgcggattcgaatcccggccgggaacggtgcattggaacgcggattccccgtgccaagagtgacgtaagtaccgcctatagagtctataggcccacaaaaaatgctttcttcttttaatatacttttttgtttatcttatttctaatactttccctaatctctttctttcagggcaataatgatacaatgtatcatgcctctttgcaccattctaaagaataacagtgataatttctgggttaaggcaatagcaatatttctgcatataaatatttctgcatataaattgtaactgatgtaagaggtttcatattgctaatagcagctacaatccagctaccattctgcttttattttatggttgggataaggctggattattctgagtccaagctaggcccttttgctaatcatgttcatacctcttatcttcctcccacagctcctgggcaacgtgctggtctgtgtgctggcccatcactttggcaaagaattgggattcgaacatcggccgccaccatgaacgcaagtgaattccgaaggagagggaaggagatggtggattacgtggccaactacatggaaggcattgagggacgccaggtctaccctgacgtggagcccgggtacctgcggccgctgatccctgccgctgcccctcaggagccagacacgtttgaggacatcatcaacgacgttgagaagataatcatgcctggggtgacgcactggcacagcccctacttcttcgcctacttccccactgccagctcgtacccggccatgcttgcggacatgctgtgcggggccattggctgcatcggcttctcctgggcggcaagcccagcatgcacagagctggagactgtgatgatggactggctcgggaagatgctggaactaccaaaggcatttttgaatgagaaagctggagaagggggaggagtgatccagggaagtgccagtgaagccaccctggtggccctgctggccgctcggaccaaagtgatccatcggctgcaggcagcgtccccagagctcacacaggccgctatcatggagaagctggtggcttactcatccgatcaggcacactcctcagtggaaagagctgggttaattggtggagtgaaattaaaagccatcccctcagatggcaacttcgccatgcgtgcgtctgccctgcaggaagccctggagagagacaaagcggctggcctgattcctttctttatggttgccaccctggggaccacaacatgctgctcctttgacaatctcttagaagtcggtcctatctgcaacaaggaagacatatggctgcacgttgatgcagcctacgcaggcagtgcattcatctgccctgagttccggcaccttctgaatggagtggagtttgcagattcattcaactttaatccccacaaatggctattggtgaattttgactgttctgccatgtgggtgaaaaagagaacagacttaacgggagcctttagactggaccccacttacctgaagcacagccatcaggattcagggcttatcactgactaccggcattggcagataccactgggcagaagatttcgctctttgaaaatgtggtttgtatttaggatgtatggagtcaaaggactgcaggcttatatccgcaagcatgtccagctgtcccatgagtttgagtcactggtgcgccaggatccccgctttgaaatctgtgtggaagtcattctggggcttgtctgctttcggctaaagggttccaacaaagtgaatgaagctcttctgcaaagaataaacagtgccaaaaaaatccacttggttccatgtcacctcagggacaagtttgtcctgcgctttgccatctgttctcgcacggtggaatctgcccatgtgcagcgggcctgggaacacatcaaagagctggcggccgacgtgctgcgagcagagagggagtaggagtgaagccagctgcaggaatcaaaaattgaagagagatatatctgaaaactggaataagaagcaaataaatatcatcctgccttcatggaactcagctgtctgtggcttcccatgtctttctccaaagttatccagagggttgtgattttgtctgcttagtatctcatcaacaaagaaatattatttgctaattaaaaagttaatcttcatggccatagcttttattcattagctgtgatttttgttgattaaaacattatagattttcatgttcttgcagtcatcagaagtggtaggaaagcctcactgatatattttccagggcaatcaatgttcacgcaacttgaaattatatctgtggtcttcaaattgtcttttgtcatgtggctaaatgcctaataagctgctcgagagatctacgggtggcatccctgtgacccctccccagtgcctctcctggccctggaagttgccactccagtgcccaccagccttgtcctaataaaattaagttgcatcattttgtctgactaggtgtccttctataatattatggggtggaggggggtggtatggagcaaggggcaagttgggaagacaacctgtagggcctgcggggtctattgggaaccaagctggagtgcagtggcacaatcttggctcactgcaatctccgcctcctgggttcaagcgattctcctgcctcagcctcccgagttgttgggattccaggcatgcatgaccaggctcagctaatttttgtttttttggtagagacggggtttcaccatattggccaggctggtctccaactcctaatctcaggtgatctacccaccttggcctcccaaattgctgggattacaggcgtgaaccactgctcccttccctgtccttctgattttgtaggtaaccgtaaccccggaccacgtgcggaccgagcggccgctctagagcatggctacgtagataagtagcatggcgggttaatcattaactacaaggaacccctagtgatggagttggccactccctctctgcgcgctcgctcgctcactgaggccgggcgaccaaaggtcgcccgacgcccgggcggcctcagtgagcgagcgagcgcgcag

SEQ ID NO: 16 - DNA, 4079 bp, Artificial Sequence
  Description of Artificial Sequence: Synthetic polynucleotide
ctgcgcgctcgctcgctcactgaggccgcccgggcaaagcccgggcgtcgggcgacctttggtcgcccggcctcagtgagcgagcgagcgcgcagagagggagtggccaactccatcactaggggttccttgtagttaatgattaacccgccatgctacttatctacgtagccatgctctagagcggccgcaacgcgtaaacttcgtcgacgatctgcggccgcacgcgtggagctagttattaatagtaatcaattacggggtcattagttcatagcccatatatggagttccgcgttacataacttacggtaaatggcccgcctggctgaccgcccaacgacccccgcccattgacgtcaataatgacgtatgttcccatagtaacgtcaatagggactttccattgacgtcaatgggtggagtatttacggtaaactgcccacttggcagtacatcaagtgtatcatatgccaagtacgccccctattgacgtcaatgacggtaaatggcccgcctggcattatgcccagtacatgaccttatgggactttcctacttggcagtacatctacgtattagtcatcgctattaccatggtgatgcggttttggcagtacatcaatgggcgtggatagcggtttgactcacggggatttccaagtctccaccccattgacgtcaatgggagtttgttttgcaccaaaatcaacgggactttccaaaatgtcgtaacaactccgccccattgacgcaaatgggcggtaggcgtgtacggtgggaggtctatataagcagagctcgtttagtgaaccgtcagatcgcctggagacgccatccacgctgttttgacctccatagaagacaccgggaccgatccagcctccgcggattcgaatcccggccgggaacggtgcattggaacgcggattccccgtgccaagagtgacgtaagtaccgcctatagagtctataggcccacaaaaaatgctttcttcttttaatatacttttttgtttatcttatttctaatactttccctaatctctttctttcagggcaataatgatacaatgtatcatgcctctttgcaccattctaaagaataacagtgataatttctgggttaaggcaatagcaatatttctgcatataaatatttctgcatataaattgtaactgatgtaagaggtttcatattgctaatagcagctacaatccagctaccattctgcttttattttatggttgggataaggctggattattctgagtccaagctaggcccttttgctaatcatgttcatacctcttatcttcctcccacagctcctgggcaacgtgctggtctgtgtgctggcccatcactttggcaaagaattgggattcgaacatcgaattcgggcacgagggaggacagagagcaagtcactcccggctgcctttttcacctctgacagagcccagacaccatgaacgcaagtgaattccgaaggagagggaaggagatggtggattacgtggccaactacatggaaggcattgagggacgccaggtctaccctgacgtggagcccgggtacctgcggccgctgatccctgccgctgcccctcaggagccagacacgtttgaggacatcatcaacgacgttgagaagataatcatgcctggggtgacgcactggcacagcccctacttcttcgcctacttccccactgccagctcgtacccggccatgcttgcggacatgctgtgcggggccattggctgcatcggcttctcctgggcggcaagcccagcatgcacagagctggagactgtgatgatggactggctcgggaagatgctggaactaccaaaggcatttttgaatgagaaagctggagaagggggaggagtgatccagggaagtgccagtgaagccaccctggtggccctgctggccgctcggaccaaagtgatccatcggctgcaggcagcgtccccagagctcacacaggccgctatcatggagaagctggtggcttactcatccgatcaggcacactcctcagtggaaagagctgggttaattggtggagtgaaattaaaagccatcccctcagatggcaacttcgccatgcgtgcgtctgccctgcaggaagccctggagagagacaaagcggctggcctgattcctttctttatggttgccaccctggggaccacaacatgctgctcctttgacaatctcttagaagtcggtcctatctgcaacaaggaagacatatggctgcacgttgatgcagcctacgcaggcagtgcattcatctgccctgagttccggcaccttctgaatggagtggagtttgcagattcattcaactttaatccccacaaatggctattggtgaattttgactgttctgccatgtgggtgaaaaagagaacagacttaacgggagcctttagactggaccccacttacctgaagcacagccatcaggattcagggcttatcactgactaccggcattggcagataccactgggcagaagatttcgctctttgaaaatgtggtttgtatttaggatgtatggagtcaaaggactgcaggcttatatccgcaagcatgtccagctgtcccatgagtttgagtcactggtgcgccaggatccccgctttgaaatctgtgtggaagtcattctggggcttgtctgctttcggctaaagggttccaacaaagtgaatgaagctcttctgcaaagaataaacagtgccaaaaaaatccacttggttccatgtcacctcagggacaagtttgtcctgcgctttgccatctgttctcgcacggtggaatctgcccatgtgcagcgggcctgggaacacatcaaagagctggcggccgacgtgctgcgagcagagagggagtaggagtgaagccagctgcaggaatcaaaaattgaagagagatatatctgaaaactggaataagaagcaaataaatatcatcctgccttcatggaactcagctgtctgtggcttcccatgtctttctccaaagttatccagagggttgtgattttgtctgcttagtatctcatcaacaaagaaatattatttgctaattaaaaagttaatcttcatggccatagcttttattcattagctgtgatttttgttgattaaaacattatagattttcatgttcttgcagtcatcagaagtggtaggaaagcctcactgatatattttccagggcaatcaatgttcacgcaacttgaaattatatctgtggtcttcaaattgtcttttgtcatgtggctaaatgcctaataaacaattcaagtgaaatactaaaaaaaaaaaaaaaaaaaaaagctgctcgagagatctacgggtggcatccctgtgacccctccccagtgcctctcctggccctggaagttgccactccagtgcccaccagccttgtcctaataaaattaagttgcatcattttgtctgactaggtgtccttctataatattatggggtggaggggggtggtatggagcaaggggcaagttgggaagacaacctgtagggcctgcggggtctattgggaaccaagctggagtgcagtggcacaatcttggctcactgcaatctccgcctcctgggttcaagcgattctcctgcctcagcctcccgagttgttgggattccaggcatgcatgaccaggctcagctaatttttgtttttttggtagagacggggtttcaccatattggccaggctggtctccaactcctaatctcaggtgatctacccaccttggcctcccaaattgctgggattacaggcgtgaaccactgctcccttccctgtccttctgattttgtaggtaacgtaaccccggaccacgtgcggaccgagcggccgctctagagcatggctacgtagataagtagcatggcgggttaatcattaactacaaggaacccctagtgatggagttggccactccctctctgcgcgctcgctcgctcactgaggccgggcgaccaaaggtcgcccgacgcccgggcggcctcagtgagcgagcgagcgcgcag

SEQ ID NO: 17 - DNA, 3497 bp, Artificial Sequence
  Description of Artificial Sequence: Synthetic polynucleotide
cctgcaggcagctgcgcgctcgctcgctcactgaggccgcccgggcaaagcccgggcgtcgggcgacctttggtcgcccggcctcagtgagcgagcgagcgcgcagagagggagtggccaactccatcactaggggttcctgagtttaaacttcgtcgacgatctgcggccgcacgcgtggagctagttattaatagtaatcaattacggggtcattagttcatagcccatatatggagttccgcgttacataacttacggtaaatggcccgcctggctgaccgcccaacgacccccgcccattgacgtcaataatgacgtatgttcccatagtaacgtcaatagggactttccattgacgtcaatgggtggagtatttacggtaaactgcccacttggcagtacatcaagtgtatcatatgccaagtacgccccctattgacgtcaatgacggtaaatggcccgcctggcattatgcccagtacatgaccttatgggactttcctacttggcagtacatctacgtattagtcatcgctattaccatggtgatgcggttttggcagtacatcaatgggcgtggatagcggtttgactcacggggatttccaagtctccaccccattgacgtcaatgggagtttgttttgcaccaaaatcaacgggactttccaaaatgtcgtaacaactccgccccattgacgcaaatgggcggtaggcgtgtacggtgggaggtctatataagcagagctcgtttagtgaaccgtcagatcgcctggagacgccatccacgctgttttgacctccatagaagacaccgggaccgatccagcctccgcggattcgaatcccggccgggaacggtgcattggaacgcggattccccgtgccaagagtgacgtaagtaccgcctatagagtctataggcccacaaaaaatgctttcttcttttaatatacttttttgtttatcttatttctaatactttccctaatctctttctttcagggcaataatgatacaatgtatcatgcctctttgcaccattctaaagaataacagtgataatttctgggttaaggcaatagcaatatttctgcatataaatatttctgcatataaattgtaactgatgtaagaggtttcatattgctaatagcagctacaatccagctaccattctgcttttattttatggttgggataaggctggattattctgagtccaagctaggcccttttgctaatcatgttcatacctcttatcttcctcccacagctcctgggcaacgtgctggtctgtgtgctggcccatcactttggcaaagaattgggattcgaacatcggccgccaccatgaacgcaagtgaattccgaaggagagggaaggagatggtggattacgtggccaactacatggaaggcattgagggacgccaggtctaccctgacgtggagcccgggtacctgcggccgctgatccctgccgctgcccctcaggagccagacacgtttgaggacatcatcaacgacgttgagaagataatcatgcctggggtgacgcactggcacagcccctacttcttcgcctacttccccactgccagctcgtacccggccatgcttgcggacatgctgtgcggggccattggctgcatcggcttctcctgggcggcaagcccagcatgcacagagctggagactgtgatgatggactggctcgggaagatgctggaactaccaaaggcatttttgaatgagaaagctggagaagggggaggagtgatccagggaagtgccagtgaagccaccctggtggccctgctggccgctcggaccaaagtgatccatcggctgcaggcagcgtccccagagctcacacaggccgctatcatggagaagctggtggcttactcatccgatcaggcacactcctcagtggaaagagctgggttaattggtggagtgaaattaaaagccatcccctcagatggcaacttcgccatgcgtgcgtctgccctgcaggaagccctggagagagacaaagcggctggcctgattcctttctttatggttgccaccctggggaccacaacatgctgctcctttgacaatctcttagaagtcggtcctatctgcaacaaggaagacatatggctgcacgttgatgcagcctacgcaggcagtgcattcatctgccctgagttccggcaccttctgaatggagtggagtttgcagattcattcaactttaatccccacaaatggctattggtgaattttgactgttctgccatgtgggtgaaaaagagaacagacttaacgggagcctttagactggaccccacttacctgaagcacagccatcaggattcagggcttatcactgactaccggcattggcagataccactgggcagaagatttcgctctttgaaaatgtggtttgtatttaggatgtatggagtcaaaggactgcaggcttatatccgcaagcatgtccagctgtcccatgagtttgagtcactggtgcgccaggatccccgctttgaaatctgtgtggaagtcattctggggcttgtctgctttcggctaaagggttccaacaaagtgaatgaagctcttctgcaaagaataaacagtgccaaaaaaatccacttggttccatgtcacctcagggacaagtttgtcctgcgctttgccatctgttctcgcacggtggaatctgcccatgtgcagcgggcctgggaacacatcaaagagctggcggccgacgtgctgcgagcagagagggagtaggagtgagctgctcgagagatctacgggtggcatccctgtgacccctccccagtgcctctcctggccctggaagttgccactccagtgcccaccagccttgtcctaataaaattaagttgcatcattttgtctgactaggtgtccttctataatattatggggtggaggggggtggtatggagcaaggggcaagttgggaagacaacctgtagggcctgcggggtctattgggaaccaagctggagtgcagtggcacaatcttggctcactgcaatctccgcctcctgggttcaagcgattctcctgcctcagcctcccgagttgttgggattccaggcatgcatgaccaggctcagctaatttttgtttttttggtagagacggggtttcaccatattggccaggctggtctccaactcctaatctcaggtgatctacccaccttggcctcccaaattgctgggattacaggcgtgaaccactgctcccttccctgtccttctgattttgtaggtaaccacgtgcggaccgagcggccgcagttaattaagctcgcgaaggaacccctagtgatggagttggccactccctctctgcgcgctcgctcgctcactgaggccgggcgaccaaaggtcgcccgacgcccgggctttgcccgggcggcctcagtgagcgagcgagcgcgcagctgcctgcagg

SEQ ID NO: 18 - DNA, 3497 bp, Artificial Sequence; identical to SEQ ID NO: 17
  Description of Artificial Sequence: Synthetic polynucleotide

SEQ ID NO: 19 - DNA, 3491 bp, Artificial Sequence
  Description of Artificial Sequence: Synthetic polynucleotide
cctgcaggcagctgcgcgctcgctcgctcactgaggccgcccgggcaaagcccgggcgtcgggcgacctttggtcgcccggcctcagtgagcgagcgagcgcgcagagagggagtggccaactccatcactaggggttcctgagtttaaacttcgtcgacgatctgcggccgcacgcgtggagctagttattaatagtaatcaattacggggtcattagttcatagcccatatatggagttccgcgttacataacttacggtaaatggcccgcctggctgaccgcccaacgacccccgcccattgacgtcaataatgacgtatgttcccatagtaacgtcaatagggactttccattgacgtcaatgggtggagtatttacggtaaactgcccacttggcagtacatcaagtgtatcatatgccaagtacgccccctattgacgtcaatgacggtaaatggcccgcctggcattatgcccagtacatgaccttatgggactttcctacttggcagtacatctacgtattagtcatcgctattaccatggtgatgcggttttggcagtacatcaatgggcgtggatagcggtttgactcacggggatttccaagtctccaccccattgacgtcaatgggagtttgttttgcaccaaaatcaacgggactttccaaaatgtcgtaacaactccgccccattgacgcaaatgggcggtaggcgtgtacggtgggaggtctatataagcagagctcgtttagtgaaccgtcagatcgcctggagacgccatccacgctgttttgacctccatagaagacaccgggaccgatccagcctccgcggattcgaatcccggccgggaacggtgcattggaacgcggattccccgtgccaagagtgacgtaagtaccgcctatagagtctataggcccacaaaaaatgctttcttcttttaatatacttttttgtttatcttatttctaatactttccctaatctctttctttcagggcaataatgatacaatgtatcatgcctctttgcaccattctaaagaataacagtgataatttctgggttaaggcaatagcaatatttctgcatataaatatttctgcatataaattgtaactgatgtaagaggtttcatattgctaatagcagctacaatccagctaccattctgcttttattttatggttgggataaggctggattattctgagtccaagctaggcccttttgctaatcatgttcatacctcttatcttcctcccacagctcctgggcaacgtgctggtctgtgtgctggcccatcactttggcaaagaattgggattcgaacatcggccgccaccatgaacgccagcgagttcaggaggaggggcaaggagatggtggactacgtggccaactacatggagggcatcgagggcaggcaggtgtaccccgacgtggagcccggctacctgaggcccctgatccccgccgccgccccccaggagcccgacaccttcgaggacatcatcaacgacgtggagaagatcatcatgcccggcgtgacccactggcacagcccctacttcttcgcctacttccccaccgccagcagctaccccgccatgctggccgacatgctgtgcggcgccatcggctgcatcggcttcagctgggccgccagccccgcctgcaccgagctggagaccgtgatgatggactggctgggcaagatgctggagctgcccaaggccttcctgaacgagaaggccggcgagggcggcggcgtgatccagggcagcgccagcgaggccaccctggtggccctgctggccgccaggaccaaggtgatccacaggctgcaggccgccagccccgagctgacccaggccgccatcatggagaagctggtggcctacagcagcgaccaggcccacagcagcgtggagagggccggcctgatcggcggcgtgaagctgaaggccatccccagcgacggcaacttcgccatgagggccagcgccctgcaggaggccctggagagggacaaggccgccggcctgatccccttcttcatggtggccaccctgggcaccaccacctgctgcagcttcgacaacctgctggaggtgggccccatctgcaacaaggaggacatctggctgcacgtggacgccgcctacgccggcagcgccttcatctgccccgagttcaggcacctgctgaacggcgtggagttcgccgacagcttcaacttcaacccccacaagtggctgctggtgaacttcgactgcagcgccatgtgggtgaagaagaggaccgacctgaccggcgccttcaggctggaccccacctacctgaagcacagccaccaggacagcggcctgatcaccgactacaggcactggcagatccccctgggcaggaggttcaggagcctgaagatgtggttcgtgttcaggatgtacggcgtgaagggcctgcaggcctacatcaggaagcacgtgcagctgagccacgagttcgagagcctggtgaggcaggaccccaggttcgagatctgcgtggaggtgatcctgggcctggtgtgcttcaggctgaagggcagcaacaaggtgaacgaggccctgctgcagaggatcaacagcgccaagaagatccacctggtgccctgccacctgagggacaagttcgtgctgaggttcgccatctgcagcaggaccgtggagagcgcccacgtgcagagggcctgggagcacatcaaggagctggccgccgacgtgctgagggccgagagggagtgagctgctcgagagatctacgggtggcatccctgtgacccctccccagtgcctctcctggccctggaagttgccactccagtgcccaccagccttgtcctaataaaattaagttgcatcattttgtctgactaggtgtccttctataatattatggggtggaggggggtggtatggagcaaggggcaagttgggaagacaacctgtagggcctgcggggtctattgggaaccaagctggagtgcagtggcacaatcttggctcactgcaatctccgcctcctgggttcaagcgattctcctgcctcagcctcccgagttgttgggattccaggcatgcatgaccaggctcagctaatttttgtttttttggtagagacggggtttcaccatattggccaggctggtctccaactcctaatctcaggtgatctacccaccttggcctcccaaattgctgggattacaggcgtgaaccactgctcccttccctgtccttctgattttgtaggtaaccacgtgcggaccgagcggccgcagttaattaagctcgcgaaggaacccctagtgatggagttggccactccctctctgcgcgctcgctcgctcactgaggccgggcgaccaaaggtcgcccgacgcccgggctttgcccgggcggcctcagtgagcgagcgagcgcgcagctgcctgcagg

SEQ ID NO: 20 - DNA, 4003 bp, Artificial Sequence
  Description of Artificial Sequence: Synthetic polynucleotide
cctgcaggcagctgcgcgctcgctcgctcactgaggccgcccgggcaaagcccgggcgtcgggcgacctttggtcgcccggcctcagtgagcgagcgagcgcgcagagagggagtggccaactccatcactaggggttcctgagtttaaacttcgtcgacgatctgcggccgcacgcgtggagctagttattaatagtaatcaattacggggtcattagttcatagcccatatatggagttccgcgttacataacttacggtaaatggcccgcctggctgaccgcccaacgacccccgcccattgacgtcaataatgacgtatgttcccatagtaacgtcaatagggactttccattgacgtcaatgggtggagtatttacggtaaactgcccacttggcagtacatcaagtgtatcatatgccaagtacgccccctattgacgtcaatgacggtaaatggcccgcctggcattatgcccagtacatgaccttatgggactttcctacttggcagtacatctacgtattagtcatcgctattaccatggtgatgcggttttggcagtacatcaatgggcgtggatagcggtttgactcacggggatttccaagtctccaccccattgacgtcaatgggagtttgttttgcaccaaaatcaacgggactttccaaaatgtcgtaacaactccgccccattgacgcaaatgggcggtaggcgtgtacggtgggaggtctatataagcagagctcgtttagtgaaccgtcagatcgcctggagacgccatccacgctgttttgacctccatagaagacaccgggaccgatccagcctccgcggattcgaatcccggccgggaacggtgcattggaacgcggattccccgtgccaagagtgacgtaagtaccgcctatagagtctataggcccacaaaaaatgctttcttcttttaatatacttttttgtttatcttatttctaatactttccctaatctctttctttcagggcaataatgatacaatgtatcatgcctctttgcaccattctaaagaataacagtgataatttctgggttaaggcaatagcaatatttctgcatataaatatttctgcatataaattgtaactgatgtaagaggtttcatattgctaatagcagctacaatccagctaccattctgcttttattttatggttgggataaggctggattattctgagtccaagctaggcccttttgctaatcatgttcatacctcttatcttcctcccacagctcctgggcaacgtgctggtctgtgtgctggcccatcactttggcaaagaattgggattcgaacatcgaattcgggcacgagggaggacagagagcaagtcactcccggctgcctttttcacctctgacagagcccagacaccatgaacgcaagtgaattccgaaggagagggaaggagatggtggattacgtggccaactacatggaaggcattgagggacgccaggtctaccctgacgtggagcccgggtacctgcggccgctgatccctgccgctgcccctcaggagccagacacgtttgaggacatcatcaacgacgttgagaagataatcatgcctggggtgacgcactggcacagcccctacttcttcgcctacttccccactgccagctcgtacccggccatgcttgcggacatgctgtgcggggccattggctgcatcggcttctcctgggcggcaagcccagcatgcacagagctggagactgtgatgatggactggctcgggaagatgctggaactaccaaaggcatttttgaatgagaaagctggagaagggggaggagtgatccagggaagtgccagtgaagccaccctggtggccctgctggccgctcggaccaaagtgatccatcggctgcaggcagcgtccccagagctcacacaggccgctatcatggagaagctggtggcttactcatccgatcaggcacactcctcagtggaaagagctgggttaattggtggagtgaaattaaaagccatcccctcagatggcaacttcgccatgcgtgcgtctgccctgcaggaagccctggagagagacaaagcggctggcctgattcctttctttatggttgccaccctggggaccacaacatgctgctcctttgacaatctcttagaagtcggtcctatctgcaacaaggaagacatatggctgcacgttgatgcagcctacgcaggcagtgcattcatctgccctgagttccggcaccttctgaatggagtggagtttgcagattcattcaactttaatccccacaaatggctattggtgaattttgactgttctgccatgtgggtgaaaaagagaacagacttaacgggagcctttagactggaccccacttacctgaagcacagccatcaggattcagggcttatcactgactaccggcattggcagataccactgggcagaagatttcgctctttgaaaatgtggtttgtatttaggatgtatggagtcaaaggactgcaggcttatatccgcaagcatgtccagctgtcccatgagtttgagtcactggtgcgccaggatccccgctttgaaatctgtgtggaagtcattctggggcttgtctgctttcggctaaagggttccaacaaagtgaatgaagctcttctgcaaagaataaacagtgccaaaaaaatccacttggttccatgtcacctcagggacaagtttgtcctgcgctttgccatctgttctcgcacggtggaatctgcccatgtgcagcgggcctgggaacacatcaaagagctggcggccgacgtgctgcgagcagagagggagtaggagtgaagccagctgcaggaatcaaaaattgaagagagatatatctgaaaactggaataagaagcaaataaatatcatcctgccttcatggaactcagctgtctgtggcttcccatgtctttctccaaagttatccagagggttgtgattttgtctgcttagtatctcatcaacaaagaaatattatttgctaattaaaaagttaatcttcatggccatagcttttattcattagctgtgatttttgttgattaaaacattatagattttcatgttcttgcagtcatcagaagtggtaggaaagcctcactgatatattttccagggcaatcaatgttcacgcaacttgaaattatatctgtggtcttcaaattgtcttttgtcatgtggctaaatgcctaataaacaattcaagtgaaatactaaaaaaaaaaaaaaaaaaaaaagctgctcgagagatctacgggtggcatccctgtgacccctccccagtgcctctcctggccctggaagttgccactccagtgcccaccagccttgtcctaataaaattaagttgcatcattttgtctgactaggtgtccttctataatattatggggtggaggggggtggtatggagcaaggggcaagttgggaagacaacctgtagggcctgcggggtctattgggaaccaagctggagtgcagtggcacaatcttggctcactgcaatctccgcctcctgggttcaagcgattctcctgcctcagcctcccgagttgttgggattccaggcatgcatgaccaggctcagctaatttttgtttttttggtagagacggggtttcaccatattggccaggctggtctccaactcctaatctcaggtgatctacccaccttggcctcccaaattgctgggattacaggcgtgaaccactgctcccttccctgtccttctgattttgtaggtaaccacgtgcggaccgagcggccgcagttaattaagctcgcgaaggaacccctagtgatggagttggccactccctctctgcgcgctcgctcgctcactgaggccgggcgaccaaaggtcgcccgacgcccgggctttgcccgggcggcctcagtgagcgagcgagcgcgcagctgcctgcagg

SEQ ID NO: 21 - DNA, 3499 bp, Artificial Sequence
  Description of Artificial Sequence: Synthetic polynucleotide
ttggccactccctctctgcgcgctcgctcgctcactgaggccgggcgaccaaaggtcgcccgacgcccgggctttgcccgggcggcctcagtgagcgagcgagcgcgcagagagggagtggccaactccatcactaggggttcctgagtttaaacttcgtcgacgatctgcggccgcacgcgtggagctagttattaatagtaatcaattacggggtcattagttcatagcccatatatggagttccgcgttacataacttacggtaaatggcccgcctggctgaccgcccaacgacccccgcccattgacgtcaataatgacgtatgttcccatagtaacgtcaatagggactttccattgacgtcaatgggtggagtatttacggtaaactgcccacttggcagtacatcaagtgtatcatatgccaagtacgccccctattgacgtcaatgacggtaaatggcccgcctggcattatgcccagtacatgaccttatgggactttcctacttggcagtacatctacgtattagtcatcgctattaccatggtgatgcggttttggcagtacatcaatgggcgtggatagcggtttgactcacggggatttccaagtctccaccccattgacgtcaatgggagtttgttttgcaccaaaatcaacgggactttccaaaatgtcgtaacaactccgccccattgacgcaaatgggcggtaggcgtgtacggtgggaggtctatataagcagagctcgtttagtgaaccgtcagatcgcctggagacgccatccacgctgttttgacctccatagaagacaccgggaccgatccagcctccgcggattcgaatcccggccgggaacggtgcattggaacgcggattccccgtgccaagagtgacgtaagtaccgcctatagagtctataggcccacaaaaaatgctttcttcttttaatatacttttttgtttatcttatttctaatactttccctaatctctttctttcagggcaataatgatacaatgtatcatgcctctttgcaccattctaaagaataacagtgataatttctgggttaaggcaatagcaatatttctgcatataaatatttctgcatataaattgtaactgatgtaagaggtttcatattgctaatagcagctacaatccagctaccattctgcttttattttatggttgggataaggctggattattctgagtccaagctaggcccttttgctaatcatgttcatacctcttatcttcctcccacagctcctgggcaacgtgctggtctgtgtgctggcccatcactttggcaaagaattgggattcgaacatcggccgccaccatgaacgccagcgagttcaggaggaggggcaaggagatggtggactacgtggccaactacatggagggcatcgagggcaggcaggtgtaccccgacgtggagcccggctacctgaggcccctgatccccgccgccgccccccaggagcccgacaccttcgaggacatcatcaacgacgtggagaagatcatcatgcccggcgtgacccactggcacagcccctacttcttcgcctacttccccaccgccagcagctaccccgccatgctggccgacatgctgtgcggcgccatcggctgcatcggcttcagctgggccgccagccccgcctgcaccgagctggagaccgtgatgatggactggctgggcaagatgctggagctgcccaaggccttcctgaacgagaaggccggcgagggcggcggcgtgatccagggcagcgccagcgaggccaccctggtggccctgctggccgccaggaccaaggtgatccacaggctgcaggccgccagccccgagctgacccaggccgccatcatggagaagctggtggcctacagcagcgaccaggcccacagcagcgtggagagggccggcctgatcggcggcgtgaagctgaaggccatccccagcgacggcaacttcgccatgagggccagcgccctgcaggaggccctggagagggacaaggccgccggcctgatccccttcttcatggtggccaccctgggcaccaccacctgctgcagcttcgacaacctgctggaggtgggccccatctgcaacaaggaggacatctggctgcacgtggacgccgcctacgccggcagcgccttcatctgccccgagttcaggcacctgctgaacggcgtggagttcgccgacagcttcaacttcaacccccacaagtggctgctggtgaacttcgactgcagcgccatgtgggtgaagaagaggaccgacctgaccggcgccttcaggctggaccccacctacctgaagcacagccaccaggacagcggcctgatcaccgactacaggcactggcagatccccctgggcaggaggttcaggagcctgaagatgtggttcgtgttcaggatgtacggcgtgaagggcctgcaggcctacatcaggaagcacgtgcagctgagccacgagttcgagagcctggtgaggcaggaccccaggttcgagatctgcgtggaggtgatcctgggcctggtgtgcttcaggctgaagggcagcaacaaggtgaacgaggccctgctgcagaggatcaacagcgccaagaagatccacctggtgccctgccacctgagggacaagttcgtgctgaggttcgccatctgcagcaggaccgtggagagcgcccacgtgcagagggcctgggagcacatcaaggagctggccgccgacgtgctgagggccgagagggagtgagctgctcgagagatctacgggtggcatccctgtgacccctccccagtgcctctcctggccctggaagttgccactccagtgcccaccagccttgtcctaataaaattaagttgcatcattttgtctgactaggtgtccttctataatattatggggtggaggggggtggtatggagcaaggggcaagttgggaagacaacctgtagggcctgcggggtctattgggaaccaagctggagtgcagtggcacaatcttggctcactgcaatctccgcctcctgggttcaagcgattctcctgcctcagcctcccgagttgttgggattccaggcatgcatgaccaggctcagctaatttttgtttttttggtagagacggggtttcaccatattggccaggctggtctccaactcctaatctcaggtgatctacccaccttggcctcccaaattgctgggattacaggcgtgaaccactgctcccttccctgtccttctgattttgtaggtaaccacgtgcggaccgagcggccgcagttaattaagctcgcgaaggaacccctagtgatggagttggccactccctctctgcgcgctcgctcgctcactgaggccgggcgaccaaaggtcgcccgacgcccgggctttgcccgggcggcctcagtgagcgagcgagcgcgcagagagggagtggccaa

SEQ ID NO: 22 - DNA, 3896 bp, Artificial Sequence
  Description of Artificial Sequence: Synthetic polynucleotide
cctgcaggcagctgcgcgctcgctcgctcactgaggccgcccgggcaaagcccgggcgtcgggcgacctttggtcgcccggcctcagtgagcgagcgagcgcgcagagagggagtggccaactccatcactaggggttcctgagtttaaacttcgtcgacgatctgcggccgcacgcgtggagctagttattaatagtaatcaattacggggtcattagttcatagcccatatatggagttccgcgttacataacttacggtaaatggcccgcctggctgaccgcccaacgacccccgcccattgacgtcaataatgacgtatgttcccatagtaacgtcaatagggactttccattgacgtcaatgggtggagtatttacggtaaactgcccacttggcagtacatcaagtgtatcatatgccaagtacgccccctattgacgtcaatgacggtaaatggcccgcctggcattatgcccagtacatgaccttatgggactttcctacttggcagtacatctacgtattagtcatcgctattaccatggtgatgcggttttggcagtacatcaatgggcgtggatagcggtttgactcacggggatttccaagtctccaccccattgacgtcaatgggagtttgttttgcaccaaaatcaacgggactttccaaaatgtcgtaacaactccgccccattgacgcaaatgggcggtaggcgtgtacggtgggaggtctatataagcagagctcgtttagtgaaccgtcagatcgcctggagacgccatccacgctgttttgacctccatagaagacaccgggaccgatccagcctccgcggattcgaatcccggccgggaacggtgcattggaacgcggattccccgtgccaagagtgacgtaagtaccgcctatagagtctataggcccacaaaaaatgctttcttcttttaatatacttttttgtttatcttatttctaatactttccctaatctctttctttcagggcaataatgatacaatgtatcatgcctctttgcaccattctaaagaataacagtgataatttctgggttaaggcaatagcaatatttctgcatataaatatttctgcatataaattgtaactgatgtaagaggtttcatattgctaatagcagctacaatccagctaccattctgcttttattttatggttgggataaggctggattattctgagtccaagctaggcccttttgctaatcatgttcatacctcttatcttcctcccacagctcctgggcaacgtgctggtctgtgtgctggcccatcactttggcaaagaattgggattcgaacatcggccgccaccatgaacgcaagtgaattccgaaggagagggaaggagatggtggattacgtggccaactacatggaaggcattgagggacgccaggtctaccctgacgtggagcccgggtacctgcggccgctgatccctgccgctgcccctcaggagccagacacgtttgaggacatcatcaacgacgttgagaagataatcatgcctggggtgacgcactggcacagcccctacttcttcgcctacttccccactgccagctcgtacccggccatgcttgcggacatgctgtgcggggccattggctgcatcggcttctcctgggcggcaagcccagcatgcacagagctggagactgtgatgatggactggctcgggaagatgctggaactaccaaaggcatttttgaatgagaaagctggagaagggggaggagtgatccagggaagtgccagtgaagccaccctggtggccctgctggccgctcggaccaaagtgatccatcggctgcaggcagcgtccccagagctcacacaggccgctatcatggagaagctggtggcttactcatccgatcaggcacactcctcagtggaaagagctgggttaattggtggagtgaaattaaaagccatcccctcagatggcaacttcgccatgcgtgcgtctgccctgcaggaagccctggagagagacaaagcggctggcctgattcctttctttatggttgccaccctggggaccacaacatgctgctcctttgacaatctcttagaagtcggtcctatctgcaacaaggaagacatatggctgcacgttgatgcagcctacgcaggcagtgcattcatctgccctgagttccggcaccttctgaatggagtggagtttgcagattcattcaactttaatccccacaaatggctattggtgaattttgactgttctgccatgtgggtgaaaaagagaacagacttaacgggagcctttagactggaccccacttacctgaagcacagccatcaggattcagggcttatcactgactaccggcattggcagataccactgggcagaagatttcgctctttgaaaatgtggtttgtatttaggatgtatggagtcaaaggactgcaggcttatatccgcaagcatgtccagctgtcccatgagtttgagtcactggtgcgccaggatccccgctttgaaatctgtgtggaagtcattctggggcttgtctgctttcggctaaagggttccaacaaagtgaatgaagctcttctgcaaagaataaacagtgccaaaaaaatccacttggttccatgtcacctcagggacaagtttgtcctgcgctttgccatctgttctcgcacggtggaatctgcccatgtgcagcgggcctgggaacacatcaaagagctggcggccgacgtgctgcgagcagagagggagtaggagtgaagccagctgcaggaatcaaaaattgaagagagatatatctgaaaactggaataagaagcaaataaatatcatcctgccttcatggaactcagctgtctgtggcttcccatgtctttctccaaagttatccagagggttgtgattttgtctgcttagtatctcatcaacaaagaaatattatttgctaattaaaaagttaatcttcatggccatagcttttattcattagctgtgatttttgttgattaaaacattatagattttcatgttcttgcagtcatcagaagtggtaggaaagcctcactgatatattttccagggcaatcaatgttcacgcaacttgaaattatatctgtggtcttcaaattgtcttttgtcatgtggctaaatgcctaataagctgctcgagagatctacgggtggcatccctgtgacccctccccagtgcctctcctggccctggaagttgccactccagtgcccaccagccttgtcctaataaaattaagttgcatcattttgtctgactaggtgtccttctataatattatggggtggaggggggtggtatggagcaaggggcaagttgggaagacaacctgtagggcctgcggggtctattgggaaccaagctggagtgcagtggcacaatcttggctcactgcaatctccgcctcctgggttcaagcgattctcctgcctcagcctcccgagttgttgggattccaggcatgcatgaccaggctcagctaatttttgtttttttggtagagacggggtttcaccatattggccaggctggtctccaactcctaatctcaggtgatctacccaccttggcctcccaaattgctgggattacaggcgtgaaccactgctcccttccctgtccttctgattttgtaggtaaccacgtgcggaccgagcggccgcagttaattaagctcgcgaaggaacccctagtgatggagttggccactccctctctgcgcgctcgctcgctcactgaggccgggcgaccaaaggtcgcccgacgcccgggctttgcccgggcggcctcagtgagcgagcgagcgcgcagctgcctgcagg

SEQ ID NO: 23 - DNA, 3475 bp, Artificial Sequence
  Description of Artificial Sequence: Synthetic polynucleotide
cagctgcgcgctcgctcgctcactgaggccgcccgggcaaagcccgggcgtcgggcgacctttggtcgcccggcctcagtgagcgagcgagcgcgcagagagggagtggccaactccatcactaggggttgagtttaaacttcgtcgacgatctgcggccgcacgcgtggagctagttattaatagtaatcaattacggggtcattagttcatagcccatatatggagttccgcgttacataacttacggtaaatggcccgcctggctgaccgcccaacgacccccgcccattgacgtcaataatgacgtatgttcccatagtaacgtcaatagggactttccattgacgtcaatgggtggagtatttacggtaaactgcccacttggcagtacatcaagtgtatcatatgccaagtacgccccctattgacgtcaatgacggtaaatggcccgcctggcattatgcccagtacatgaccttatgggactttcctacttggcagtacatctacgtattagtcatcgctattaccatggtgatgcggttttggcagtacatcaatgggcgtggatagcggtttgactcacggggatttccaagtctccaccccattgacgtcaatgggagtttgttttgcaccaaaatcaacgggactttccaaaatgtcgtaacaactccgccccattgacgcaaatgggcggtaggcgtgtacggtgggaggtctatataagcagagctcgtttagtgaaccgtcagatcgcctggagacgccatccacgctgttttgacctccatagaagacaccgggaccgatccagcctccgcggattcgaatcccggccgggaacggtgcattggaacgcggattccccgtgccaagagtgacgtaagtaccgcctatagagtctataggcccacaaaaaatgctttcttcttttaatatacttttttgtttatcttatttctaatactttccctaatctctttctttcagggcaataatgatacaatgtatcatgcctctttgcaccattctaaagaataacagtgataatttctgggttaaggcaatagcaatatttctgcatataaatatttctgcatataaattgtaactgatgtaagaggtttcatattgctaatagcagctacaatccagctaccattctgcttttattttatggttgggataaggctggattattctgagtccaagctaggcccttttgctaatcatgttcatacctcttatcttcctcccacagctcctgggcaacgtgctggtctgtgtgctggcccatcactttggcaaagaattgggattcgaacatcggccgccaccatgaacgcaagtgaattccgaaggagagggaaggagatggtggattacgtggccaactacatggaaggcattgagggacgccaggtctaccctgacgtggagcccgggtacctgcggccgctgatccctgccgctgcccctcaggagccagacacgtttgaggacatcatcaacgacgttgagaagataatcatgcctggggtgacgcactggcacagcccctacttcttcgcctacttccccactgccagctcgtacccggccatgcttgcggacatgctgtgcggggccattggctgcatcggcttctcctgggcggcaagcccagcatgcacagagctggagactgtgatgatggactggctcgggaagatgctggaactaccaaaggcatttttgaatgagaaagctggagaagggggaggagtgatccagggaagtgccagtgaagccaccctggtggccctgctggccgctcggaccaaagtgatccatcggctgcaggcagcgtccccagagctcacacaggccgctatcatggagaagctggtggcttactcatccgatcaggcacactcctcagtggaaagagctgggttaattggtggagtgaaattaaaagccatcccctcagatggcaacttcgccatgcgtgcgtctgccctgcaggaagccctggagagagacaaagcggctggcctgattcctttctttatggttgccaccctggggaccacaacatgctgctcctttgacaatctcttagaagtcggtcctatctgcaacaaggaagacatatggctgcacgttgatgcagcctacgcaggcagtgcattcatctgccctgagttccggcaccttctgaatggagtggagtttgcagattcattcaactttaatccccacaaatggctattggtgaattttgactgttctgccatgtgggtgaaaaagagaacagacttaacgggagcctttagactggaccccacttacctgaagcacagccatcaggattcagggcttatcactgactaccggcattggcagataccactgggcagaagatttcgctctttgaaaatgtggtttgtatttaggatgtatggagtcaaaggactgcaggcttatatccgcaagcatgtccagctgtcccatgagtttgagtcactggtgcgccaggatccccgctttgaaatctgtgtggaagtcattctggggcttgtctgctttcggctaaagggttccaacaaagtgaatgaagctcttctgcaaagaataaacagtgccaaaaaaatccacttggttccatgtcacctcagggacaagtttgtcctgcgctttgccatctgttctcgcacggtggaatctgcccatgtgcagcgggcctgggaacacatcaaagagctggcggccgacgtgctgcgagcagagagggagtaggagtgagctgctcgagagatctacgggtggcatccctgtgacccctccccagtgcctctcctggccctggaagttgccactccagtgcccaccagccttgtcctaataaaattaagttgcatcattttgtctgactaggtgtccttctataatattatggggtggaggggggtggtatggagcaaggggcaagttgggaagacaacctgtagggcctgcggggtctattgggaaccaagctggagtgcagtggcacaatcttggctcactgcaatctccgcctcctgggttcaagcgattctcctgcctcagcctcccgagttgttgggattccaggcatgcatgaccaggctcagctaatttttgtttttttggtagagacggggtttcaccatattggccaggctggtctccaactcctaatctcaggtgatctacccaccttggcctcccaaattgctgggattacaggcgtgaaccactgctcccttccctgtccttctgattttgtaggtaaccacgtgcggaccgagcggccgcagttaattaagctcgcgaaacccctagtgatggagttggccactccctctctgcgcgctcgctcgctcactgaggccgggcgaccaaaggtcgcccgacgcccgggctttgcccgggcggcctcagtgagcgagcgagcgcgcagctg

SEQ ID NO: 24 - DNA, 1449 bp, Artificial Sequence
  Description of Artificial Sequence: Synthetic polynucleotide
atgaacgcaagtgaattccgaaggagagggaaggagatggtggattacgtggccaactacatggaaggcattgagggacgccaggtctaccctgacgtggagcccgggtacctgcggccgctgatccctgccgctgcccctcaggagccagacacgtttgaggacatcatcaacgacgttgagaagataatcatgcctggggtgacgcactggcacagcccctacttcttcgcctacttccccactgccagctcgtacccggccatgcttgcggacatgctgtgcggggccattggctgcatcggcttctcctgggcggcaagcccagcatgcacagagctggagactgtgatgatggactggctcgggaagatgctggaactaccaaaggcatttttgaatgagaaagctggagaagggggaggagtgatccagggaagtgccagtgaagccaccctggtggccctgctggccgctcggaccaaagtgatccatcggctgcaggcagcgtccccagagctcacacaggccgctatcatggagaagctggtggcttactcatccgatcaggcacactcctcagtggaaagagctgggttaattggtggagtgaaattaaaagccatcccctcagatggcaacttcgccatgcgtgcgtctgccctgcaggaagccctggagagagacaaagcggctggcctgattcctttctttatggttgccaccctggggaccacaacatgctgctcctttgacaatctcttagaagtcggtcctatctgcaacaaggaagacatatggctgcacgttgatgcagcctacgcaggcagtgcattcatctgccctgagttccggcaccttctgaatggagtggagtttgcagattcattcaactttaatccccacaaatggctattggtgaattttgactgttctgccatgtgggtgaaaaagagaacagacttaacgggagcctttagactggaccccacttacctgaagcacagccatcaggattcagggcttatcactgactaccggcattggcagataccactgggcagaagatttcgctctttgaaaatgtggtttgtatttaggatgtatggagtcaaaggactgcaggcttatatccgcaagcatgtccagctgtcccatgagtttgagtcactggtgcgccaggatccccgctttgaaatctgtgtggaagtcattctggggcttgtctgctttcggctaaagggttccaacaaagtgaatgaagctcttctgcaaagaataaacagtgccaaaaaaatccacttggttccatgtcacctcagggacaagtttgtcctgcgctttgccatctgttctcgcacggtggaatctgcccatgtgcagcgggcctgggaacacatcaaagagctggcggccgacgtgctgcgagcagagagggagtaggagtga

SEQ ID NO: 25 - DNA, 2211 bp, Adeno-associated virus 1
atggctgccgatggttatcttccagattggctcgaggacaacctctctgagggcattcgcgagtggtgggacttgaaacctggagccccgaagcccaaagccaaccagcaaaagcaggacgacggccggggtctggtgcttcctggctacaagtacctcggacccttcaacggactcgacaagggggagcccgtcaacgcggcggacgcagcggccctcgagcacgacaaggcctacgaccagcagctcaaagcgggtgacaatccgtacctgcggtataaccacgccgacgccgagtttcaggagcgtctgcaagaagatacgtcttttgggggcaacctcgggcgagcagtcttccaggccaagaagcgggttctcgaacctctcggtctggttgaggaaggcgctaagacggctcctggaaagaaacgtccggtagagcagtcgccacaagagccagactcctcctcgggcatcggcaagacaggccagcagcccgctaaaaagagactcaattttggtcagactggcgactcagagtcagtccccgatccacaacctctcggagaacctccagcaacccccgctgctgtgggacctactacaatggcttcaggcggtggcgcaccaatggcagacaataacgaaggcgccgacggagtgggtaatgcctcaggaaattggcattgcgattccacatggctgggcgacagagtcatcaccaccagcacccgcacctgggccttgcccacctacaataaccacctctacaagcaaatctccagtgcttcaacgggggccagcaacgacaaccactacttcggctacagcaccccctgggggtattttgatttcaacagattccactgccacttttcaccacgtgactggcagcgactcatcaacaacaattggggattccggcccaagagactcaacttcaaactcttcaacatccaagtcaaggaggtcacgacgaatgatggcgtcacaaccatcgctaataaccttaccagcacggttcaagtcttctcggactcggagtaccagcttccgtacgtcctcggctctgcgcaccagggctgcctccctccgttcccggcggacgtgttcatgattccgcaatacggctacctgacgctcaacaatggcagccaagccgtgggacgttcatccttttactgcctggaatatttcccttctcagatgctgagaacgggcaacaactttaccttcagctacacctttgaggaagtgcctttccacagcagctacgcgcacagccagagcctggaccggctgatgaatcctctcatcgaccaatacctgtattacctgaacagaactcaaaatcagtccggaagtgcccaaaacaaggacttgctgtttagccgtgggtctccagctggcatgtctgttcagcccaaaaactggctacctggaccctgttatcggcagcagcgcgtttctaaaacaaaaacagacaacaacaacagcaattttacctggactggtgcttcaaaatataacctcaatgggcgtgaatccatcatcaaccctggcactgctatggcctcacacaaagacgacgaagacaagttctttcccatgagcggtgtcatgatttttggaaaagagagcgccggagcttcaaacactgcattggacaatgtcatgattacagacgaagaggaaattaaagccactaaccctgtggccaccgaaagatttgggaccgtggcagtcaatttccagagcagcagcacagaccctgcgaccggagatgtgcatgctatgggagcattacctggcatggtgtggcaagatagagacgtgtacctgcagggtcccatttgggccaaaattcctcacacagatggacactttcacccgtctcctcttatgggcggctttggactcaagaacccgcctcctcagatcctcatcaaaaacacgcctgttcctgcgaatcctccggcggagttttcagctacaaagtttgcttcattcatcacccaatactccacaggacaagtgagtgtggaaattgaatgggagctgcagaaagaaaacagcaagcgctggaatcccgaagtgcagtacacatccaattatgcaaaatctgccaacgttgattttactgtggacaacaatggactttatactgagcctcgccccattggcacccgttaccttacccgtcccctgtaa

SEQ ID NO: 26 - protein, 736 aa, Adeno-associated virus 1
MAADGYLPDWLEDNLSEGIREWWDLKPGAPKPKANQQKQDDGRGLVLPGYKYLGPFNGLDKGEPVNAADAAALEHDKAYDQQLKAGDNPYLRYNHADAEFQERLQEDTSFGGNLGRAVFQAKKRVLEPLGLVEEGAKTAPGKKRPVEQSPQEPDSSSGIGKTGQQPAKKRLNFGQTGDSESVPDPQPLGEPPATPAAVGPTTMASGGGAPMADNNEGADGVGNASGNWHCDSTWLGDRVITTSTRTWALPTYNNHLYKQISSASTGASNDNHYFGYSTPWGYFDFNRFHCHFSPRDWQRLINNNWGFRPKRLNFKLFNIQVKEVTTNDGVTTIANNLTSTVQVFSDSEYQLPYVLGSAHQGCLPPFPADVFMIPQYGYLTLNNGSQAVGRSSFYCLEYFPSQMLRTGNNFTFSYTFEEVPFHSSYAHSQSLDRLMNPLIDQYLYYLNRTQNQSGSAQNKDLLFSRGSPAGMSVQPKNWLPGPCYRQQRVSKTKTDNNNSNFTWTGASKYNLNGRESIINPGTAMASHKDDEDKFFPMSGVMIFGKESAGASNTALDNVMITDEEEIKATNPVATERFGTVAVNFQSSSTDPATGDVHAMGALPGMVWQDRDVYLQGPIWAKIPHTDGHFHPSPLMGGFGLKNPPPQILIKNTPVPANPPAEFSATKFASFITQYSTGQVSVEIEWELQKENSKRWNPEVQYTSNYAKSANVDFTVDNNGLYTEPRPIGTRYLTRPL

SEQ ID NO: 27 - DNA, 4718 bp, Adeno-associated virus 1
ttgcccactccctctctgcgcgctcgctcgctcggtggggcctgcggaccaaaggtccgcagacggcagagctctgctctgccggccccaccgagcgagcgagcgcgcagagagggagtgggcaactccatcactaggggtaatcgcgaagcgcctcccacgctgccgcgtcagcgctgacgtaaattacgtcataggggagtggtcctgtattagctgtcacgtgagtgcttttgcgacattttgcgacaccacgtggccatttagggtatatatggccgagtgagcgagcaggatctccattttgaccgcgaaatttgaacgagcagcagccatgccgggcttctacgagatcgtgatcaaggtgccgagcgacctggacgagcacctgccgggcatttctgactcgtttgtgagctgggtggccgagaaggaatgggagctgcccccggattctgacatggatctgaatctgattgagcaggcacccctgaccgtggccgagaagctgcagcgcgacttcctggtccaatggcgccgcgtgagtaaggccccggaggccctcttctttgttcagttcgagaagggcgagtcctacttccacctccatattctggtggagaccacgggggtcaaatccatggtgctgggccgcttcctgagtcagattagggacaagctggtgcagaccatctaccgcgggatcgagccgaccctgcccaactggttcgcggtgaccaagacgcgtaatggcgccggaggggggaacaaggtggtggacgagtgctacatccccaactacctcctgcccaagactcagcccgagctgcagtgggcgtggactaacatggaggagtatataagcgcctgtttgaacctggccgagcgcaaacggctcgtggcgcagcacctgacccacgtcagccagacccaggagcagaacaaggagaatctgaaccccaattctgacgcgcctgtcatccggtcaaaaacctccgcgcgctacatggagctggtcgggtggctggtggaccggggcatcacctccgagaagcagtggatccaggaggaccaggcctcgtacatctccttcaacgccgcttccaactcgcggtcccagatcaaggccgctctggacaatgccggcaagatcatggcgctgaccaaatccgcgcccgactacctggtaggccccgctccgcccgcggacattaaaaccaaccgcatctaccgcatcctggagctgaacggctacgaacctgcctacgccggctccgtctttctcggctgggcccagaaaaggttcgggaagcgcaacaccatctggctgtttgggccggccaccacgggcaagaccaacatcgcggaagccatcgcccacgccgtgcccttctacggctgcgtcaactggaccaatgagaactttcccttcaatgattgcgtcgacaagatggtgatctggtgggaggagggcaagatgacggccaaggtcgtggagtccgccaaggccattctcggcggcagcaaggtgcgcgtggaccaaaagtgcaagtcgtccgcccagatcgaccccacccccgtgatcgtcacctccaacaccaacatgtgcgccgtgattgacgggaacagcaccaccttcgagcaccagcagccgttgcaggaccggatgttcaaatttgaactcacccgccgtctggagcatgactttggcaaggtgacaaagcaggaagtcaaagagttcttccgctgggcgcaggatcacgtgaccgaggtggcgcatgagttctacgtcagaaagggtggagccaacaaaagacccgcccccgatgacgcggataaaagcgagcccaagcgggcctgcccctcagtcgcggatccatcgacgtcagacgcggaaggagctccggtggactttgccgacaggtaccaaaacaaatgttctcgtcacgcgggcatgcttcagatgctgtttccctgcaagacatgcgagagaatgaatcagaatttcaacatttgcttcacgcacgggacgagagactgttcagagtgcttccccggcgtgtcagaatctcaaccggtcgtcagaaagaggacgtatcggaaactctgtgccattcatcatctgctggggcgggctcccgagattgcttgctcggcctgcgatctggtcaacgtggacctggatgactgtgtttctgagcaataaatgacttaaaccaggtatggctgccgatggttatcttccagattggctcgaggacaacctctctgagggcattcgcgagtggtgggacttgaaacctggagccccgaagcccaaagccaaccagcaaaagcaggacgacggccggggtctggtgcttcctggctacaagtacctcggacccttcaacggactcgacaagggggagcccgtcaacgcggcggacgcagcggccctcgagcacgacaaggcctacgaccagcagctcaaagcgggtgacaatccgtacctgcggtataaccacgccgacgccgagtttcaggagcgtctgcaagaagatacgtcttttgggggcaacctcgggcgagcagtcttccaggccaagaagcgggttctcgaacctctcggtctggttgaggaaggcgctaagacggctcctggaaagaaacgtccggtagagcagtcgccacaagagccagactcctcctcgggcatcggcaagacaggccagcagcccgctaaaaagagactcaattttggtcagactggcgactcagagtcagtccccgatccacaacctctcggagaacctccagcaacccccgctgctgtgggacctactacaatggcttcaggcggtggcgcaccaatggcagacaataacgaaggcgccgacggagtgggtaatgcctcaggaaattggcattgcgattccacatggctgggcgacagagtcatcaccaccagcacccgcacctgggccttgcccacctacaataaccacctctacaagcaaatctccagtgcttcaacgggggccagcaacgacaaccactacttcggctacagcaccccctgggggtattttgatttcaacagattccactgccacttttcaccacgtgactggcagcgactcatcaacaacaattggggattccggcccaagagactcaacttcaaactcttcaacatccaagtcaaggaggtcacgacgaatgatggcgtcacaaccatcgctaataaccttaccagcacggttcaagtcttctcggactcggagtaccagcttccgtacgtcctcggctctgcgcaccagggctgcctccctccgttcccggcggacgtgttcatgattccgcaatacggctacctgacgctcaacaatggcagccaagccgtgggacgttcatccttttactgcctggaatatttcccttctcagatgctgagaacgggcaacaactttaccttcagctacacctttgaggaagtgcctttccacagcagctacgcgcacagccagagcctggaccggctgatgaatcctctcatcgaccaatacctgtattacctgaacagaactcaaaatcagtccggaagtgcccaaaacaaggacttgctgtttagccgtgggtctccagctggcatgtctgttcagcccaaaaactggctacctggaccctgttatcggcagcagcgcgtttctaaaacaaaaacagacaacaacaacagcaattttacctggactggtgcttcaaaatataacctcaatgggcgtgaatccatcatcaaccctggcactgctatggcctcacacaaagacgacgaagacaagttctttcccatgagcggtgtcatgatttttggaaaagagagcgccggagcttcaaacactgcattggacaatgtcatgattacagacgaagaggaaattaaagccactaaccctgtggccaccgaaagatttgggaccgtggcagtcaatttccagagcagcagcacagaccctgcgaccggagatgtgcatgctatgggagcattacctggcatggtgtggcaagatagagacgtgtacctgcagggtcccatttgggccaaaattcctcacacagatggacactttcacccgtctcctcttatgggcggctttggactcaagaacccgcctcctcagatcctcatcaaaaacacgcctgttcctgcgaatcctccggcggagttttcagctacaaagtttgcttcattcatcacccaatactccacaggacaagtgagtgtggaaattgaatgggagctgcagaaagaaaacagcaagcgctggaatcccgaagtgcagtacacatccaattatgcaaaatctgccaacgttgattttactgtggacaacaatggactttatactgagcctcgccccattggcacccgttaccttacccgtcccctgtaattacgtgttaatcaataaaccggttgattcgtttcagttgaactttggtctcctgtccttcttatcttatcggttaccatggttatagcttacacattaactgcttggttgcgcttcgcgataaaagacttacgtcatcgggttacccctagtgatggagttgcccactccctctctgcgcgctcgctcgctcggtggggcctgcggaccaaaggtccgcagacggcagagctctgctctgccggccccaccgagcgagcgagcgcgcagagagggagtgggcaa

SEQ ID NO: 28 - DNA, 3131 bp, Adeno-associated virus
gcggccgcgaattcgcccttggctgcgtcaactggaccaatgagaactttcccttcaatgattgcgtcgacaagatggtgatctggtgggaggagggcaagatgacggccaaggtcgtggagtccgccaaggccattctcggcggcagcaaggtgcgcgtggaccaaaagtgcaagtcgtccgcccagatcgaccccacccccgtgatcgtcacctccaacaccaacatgtgcgccgtgattgacgggaacagcaccaccttcgagcaccagcagcctctccaggaccggatgtttaagttcgaactcacccgccgtctggagcacgactttggcaaggtgacaaagcaggaagtcaaagagttcttccgctgggccagtgatcacgtgaccgaggtggcgcatgagttttacgtcagaaagggcggagccagcaaaagacccgcccccgatgacgcggataaaagcgagcccaagcgggcctgcccctcagtcgcggatccatcgacgtcagacgcggaaggagctccggtggactttgccgacaggtaccaaaacaaatgttctcgtcacgcgggcatgcttcagatgctgtttccctgcaaaacgtgcgagagaatgaatcggaatttcaacatttgcttcacacacggggtcagagactgctcagagtgtttccccggcgtgtcagaatctcaaccggtcgtcagaaagaggacgtatcggaaactccgtgcgattcatcatctgctggggcgggctcccgagattgcttgctcggcctgcgatctggtcaacgtggacctggatgactgtgtttctgagcaataaatgacttaaaccaggtatggctgccgatggttatcttccagattggctcgaggacaacctctctgagggcattcgcgagtggtgggcgctgaaacctggagccccgaagcccaaagccaaccagcaaaagcaggacgacggccggggtctggtgcttcctggctacaagtacctcggacccttcaacggactcgacaagggggagcccgtcaacgcggcggacgcagcggccctcgagcacgacaaggcttacgaccagcagctgcaggcgggtgacaatccgtacctgcggtataaccacgccgacgccgagtttcaggagcgtctgcaagaagatacgtcttttgggggcaacctcgggcgagcagtcttccaggccaagaagcgggttctcgaacctctcggtctggttgaggaaggcgctaagacggctcctggaaagaagagaccggtagagccatcaccccagcgttctccagactcctctacgggcatcggcaagaaaggccaacagcccgccagaaaaagactcaattttggtcagactggcgactcagagtcagttccagaccctcaacctctcggagaacctccagcagcgccctctggtgtgggacctaatacaatggctgcaggcggtggcgcaccaatggcagacaataacgaaggcgccgacggagtgggtagttcctcgggaaattggcattgcgattccacatggctgggcgacagagtcatcaccaccagcacccgaacctgggccctgcccacctacaacaaccacctctacaagcaaatctccaacgggacatcgggaggagccaccaacgacaacacctacttcggctacagcaccccctgggggtattttgactttaacagattccactgccacctttcaccacgtgactggcagcgactcatcaacaacaactggggattccgacccaagagactcagcttcaagctcttcaacatccaggtcaaggaggtcacgcagaatgaaggcaccaagaccatcgccaataacctcaccagcaccatccaggtgtttacggactcggagtaccagctgccgtacgttctcggctctgtccaccagggctgcctgcctccgttcccggcggacgtgttcatgattccccagtacggctacctaacactcaacaacggtagtcaggccgtgggacgctcctccttctactgcctggaatactttccttcgcagatgctgagaaccggcaacaacttccagtttacttacaccttcgaggacgtgcctttccacagcagctacgcccacagctagagcttggaccggctgatgaatcctctgattgaccagtacctgtactacttgtctcggactcaaacaacaggaggcacggcaaatacgcagactctgggcttcagccaaggtgggcctaatacaatggccaatcaggcaaagaactggctgccaggaccctgttaccgccaacaacgcgtctcaacgacaaccgggcaaaacaacaatagcaactttgcctggactgctgggaccaaataccatctgaatggaagaaattcattggctaatcctggcatcgctatggcaacacacaaagacgacgaggagcgtttttttcccagtaacgggatcctgatttttggcaaacaaaatgctgccagagacaatgcggattacagcgatgtcatgctcaccagcgaggaagaaatcaaaaccactaaccctgtggctacagaggaatacggtatcgtggcagataacttgcagcagcaaaacacggctcctcaaattggaactgtcaacagccagggggccttacccggtatggtctggcagaaccgggacgtgtacctgcagggtcccatctgggccaagattcctcacacggacggcaacttccacccgtctccgctgatgggcggctttggcctgaaacatcctccgcctcagatcctgatcaagaacacgcctgtacctgcggatcctccgaccaccttcaaccagtcaaagctgaactctttcatcacgcaatacagcaccggacaggtcagcgtggaaattgaatgggagctgcagaaggaaaacagcaagcgctggaaccccgagatccagtacacctccaactactacaaatctataagtgtggactttgctgttaatacagaaggcgtgtactctgaaccccgccccattggcacccgttacctcacccgtaatctgtaattgcctgttaatcaataaaccggttgattcgtttcagttgaactttggtctctgcgaagggcgaattc

SEQ ID NO: 29 - DNA, 255 bp, Adeno-associated virus 10
ggtaattcctccggaaattggcattgcgattccacatggctgggcgacagagtcatcaccaccagcacccgaacctgggtcctgcccacctacaacaaccacatctacaagcaaatctccagcgagacaggagccaccaacgacaaccactacttcggctacagcaccccctgggggtattttgactttaacagattccactgccacttttcaccacgtgactggcagcgactcatcaacaacaactggggattc

SEQ ID NO: 30 - protein, 738 aa, Adeno-associated virus 10
MAADGYLPDWLEDNLSEGIREWWDLKPGAPKPKANQQKQDDGRGLVLPGYKYLGPFNGLDKGEPVNAADAAALEHDKAYDQQLKAGDNPYLRYNHADAEFQERLQEDTSFGGNLGRAVFQAKKRVLEPLGLVEEAAKTAPGKKRPVEPSPQRSPDSSTGIGKKGQQPAKKRLNFGQTGESESVPDPQPIGEPPAGPSGLGSGTMAAGGGAPMADNNEGADGVGSSSGNWHCDSTWLGDRVITTSTRTWALPTYNNHLYKQISNGTSGGSTNDNTYFGYSTPWGYFDFNRFHCHFSPRDWQRLINNNWGFRPKRLSFKLFNIQVKEVTQNEGTKTIANNLTSTIQVFTDSEYQLPYVLGSAHQGCLPPFPADVFMIPQYGYLTLNNGSQAVGRSSFYCLEYFPSQMLRTGNNFEFSYTFEDVPFHSSYAHSQSLDRLMNPLIDQYLYYLSRTQSTGGTQGTQQLLFSQAGPANMSAQAKNWLPGPCYRQQRVSTTLSQNNNSNFAWTGATKYHLNGRDSLVNPGVAMATHKDDEERFFPSSGVLMFGKQGAGRDNVDYSSVMLTSEEEIKTTNPVATEQYGVVADNLQQANTGPIVGNVNSQGALPGMVWQNRDVYLQGPIWAKIPHTDGNFHPSPLMGGFGLKHPPPQILIKNTPVPADPPTTFSQAKLASFITQYSTGQVSVEIEWELQKENSKRWNPEIQYTSNYYKSTNVDFAVNTEGTYSEPRPIGTRYLTRNL

SEQ ID NO: 31 - protein, 738 aa, Adeno-associated virus 10
MAADGYLPDWLEDNLSEGIREWWDLKPGAPKPKANQQKQDDGRGLVLPGYKYLGPFNGLDKGEPVNAADAAALEHDKAYDQQLKAGDNPYLRYNHADAEFQERLQEDTSFGGNLGRAVFQAKKRVLEPLGLVEEGAKTAPGKKRPVEPSPQRSPDSSTGIGKKGQQPAKKRLNFGQTGDSESVPDPQPIGEPPAGPSGLGSGTMAAGGGAPMADNNEGADGVGSSSGNWHCDSTWLGDRVITTSTRTWALPTYNNHLYKQISNGTSGGSTNDNTYFGYSTPWGYFDFNRFHCHFSPRDWQRLINNNWGFRPKRLNFKLFNIQVKEVTQNEGTKTIANNLTSTIQVFTDSEYQLPYVLGSAHQGCLPPFPADVFMIPQYGYLTLNNGSQAVGRSSFYCLEYFPSQMLRTGNNFEFSYQFEDVPFHSSYAHSQSLDRLMNPLIDQYLYYLSRTQSTGGTAGTQQLLFSQAGPNNMSAQAKNWLPGPCYRQQRVSTTLSQNNNSNFAWTGATKYHLNGRDSLVNPGVAMATHKDDEERFFPSSGVLMFGKQGAGKDNVDYSSVMLTSEEEIKTTNPVATEQYGVVADNLQQQNAAPIVGAVNSQGALPGMVWQNRDVYLQGPIWAKIPHTDGNFHPSPLMGGFGLKHPPPQILIKNTPVPADPPTTFSQAKLASFITQYSTGQVSVEIEWELQKENSKRWNPEIQYTSNYYKSTNVDFAVNTDGTYSEPRPIGTRYLTRNL

SEQ ID NO: 32 - DNA, 258 bp, Adeno-associated virus 11
ggtaattcctccggaaattggcattgcgattccacatggctgggcgacagagtcatcaccaccagcacccgaacctgggccctgccaacctacaacaaccacctctacaaacaaatctccagcgcttcaacgggggccagcaacgacaaccactactttggctacagcaccccctgggggtattttgactttaacagattccactgccacttctcaccacgtgactggcagcgactcatcaacaacaactggggattc

SEQ ID NO: 33 - DNA, 255 bp, Adeno-associated virus 12
ggtaattcctccggaaattggcattgcgattccacatggctgggcgaccgagtcattaccaccagcacccggacttgggccctgcccacctacaacaaccacctctacaagcaaatctccagccaatcgggtgccaccaacgacaaccactacttcggctacagcaccccttgggggtattttgatttcaacagattccactgccatttctcaccacgtgactggcagcgactcatcaacaacaactggggattc

SEQ ID NO: 34 - DNA, 2208 bp, Adeno-associated virus 2
atggctgccgatggttatcttccagattggctcgaggacactctctctgaaggaataagacagtggtggaagctcaaacctggcccaccaccaccaaagcccgcagagcggcataaggacgacagcaggggtcttgtgcttcctgggtacaagtacctcggacccttcaacggactcgacaagggagagccggtcaacgaggcagacgccgcggccctcgagcacgacaaagcctacgaccggcagctcgacagcggagacaacccgtacctcaagtacaaccacgccgacgcggagtttcaggagcgccttaaagaagatacgtcttttgggggcaacctcggacgagcagtcttccaggcgaaaaagagggttcttgaacctctgggcctggttgaggaacctgttaagacggctccgggaaaaaagaggccggtagagcactctcctgtggagccagactcctcctcgggaaccggaaaggcgggccagcagcctgcaagaaaaagattgaattttggtcagactggagacgcagactcagtacctgacccccagcctctcggacagccaccagcagccccctctggtctgggaactaatacgatggctacaggcagtggcgcaccaatggcagacaataacgagggcgccgacggagtgggtaattcctcgggaaattggcattgcgattccacatggatgggcgacagagtcatcaccaccagcacccgaacctgggccctgcccacctacaacaaccacctctacaaacaaatttccagccaatcaggagcctcgaacgacaatcactactttggctacagcaccccttgggggtattttgacttcaacagattccactgccacttttcaccacgtgactggcaaagactcatcaacaacaactggggattccgacccaagagactcaacttcaagctctttaacattcaagtcaaagaggtcacgcagaatgacggtacgacgacgattgccaataaccttaccagcacggttcaggtgtttactgactcggagtaccagctcccgtacgtcctcggctcggcgcatcaaggatgcctcccgccgttcccagcagacgtcttcatggtgccacagtatggatacctcaccctgaacaacgggagtcaggcagtaggacgctcttcattttactgcctggagtactttccttctcagatgctgcgtaccggaaacaactttaccttcagctacacttttgaggacgttcctttccacagcagctacgctcacagccagagtctggaccgtctcatgaatcctctcatcgaccagtacctgtattacttgagcagaacaaacactccaagtggaaccaccacgcagtcaaggcttcagttttctcaggccggagcgagtgacattcgggaccagtctaggaactggcttcctggaccctgttaccgccagcagcgagtatcaaagacatctgcggataacaacaacagtgaatactcgtggactggagctaccaagtaccacctcaatggcagagactctctggtgaatccgggcccggccatggcaagccacaaggacgatgaagaaaagttttttcctcagagcggggttctcatctttgggaagcaaggctcagagaaaacaaatgtggacattgaaaaggtcatgattacagacgaagaggaaatcaggacaaccaatcccgtggctacggagcagtatggttctgtatctaccaacctccagagaggcaacagacaagcagctaccgcagatgtcaacacacaaggcgttcttccaggcatggtctggcaggacagagatgtgtaccttcaggggcccatctgggcaaagattccacacacggacggacattttcacccctctcccctcatgggtggattcggacttaaacaccctcctccacagattctcatcaagaacaccccggtacctgcgaatccttcgaccaccttcagtgcggcaaagtttgcttccttcatcacacagtactccacgggacaggtcagcgtggagatcgagtgggagctgcagaaggaaaacagcaaacgctggaatcccgaaattcagtacacttccaactacaacaagtctgttaatgtggactttactgtggacactaatggcgtgtattcagagcctcgccccattggcaccagatacctgactcgtaatctgtaa

SEQ ID NO: 35 - protein, 735 aa, Adeno-associated virus 2 [sequence omitted]

SEQ ID NO: 36 - protein, 621 aa, Adeno-associated virus 2
MPGFYEIVIKVPSDLDGHLPGISDSFVNWVAEKEWELPPDSDMDLNLIEQAPLTVAEKLQRDFLTEWRRVSKAPEALFFVQFEKGESYFHMHVLVETTGVKSMVLGRFLSQIREKLIQRIYRGIEPTLPNWFAVTKTRNGAGGGNKVVDECYIPNYLLPKTQPELQWAWTNMEQYLSACLNLTERKRLVAQHLTHVSQTQEQNKENQNPNSDAPVIRSKTSARYMELVGWLVDKGITSEKQWIQEDQASYISFNAASNSRSQIKAALDNAGKIMSLTKTAPDYLVGQQPVEDISSNRIYKILELNGYDPQYAASVFLGWATKKFGKRNTIWLFGPATTGKTNIAEAIAHTVPFYGCVNWTNENFPFNDCVDKMVIWWEEGKMTAKVVESAKAILGGSKVRVDQKCKSSAQIDPTPVIVTSNTNMCAVIDGNSTTFEHQQPLQDRMFKFELTRRLDHDFGKVTKQEVKDFFRWAKDHVVEVEHEFYVKKGGAKKRPAPSDADISEPKRVRESVAQPSTSDAEASINYADRYQNKCSRHVGMNLMLFPCRQCERMNQNSNICFTHGQKDCLECFPVSESQPVSVVKKAYQKLCYIHHIMGKVPDACTACDLVNVDLDDCIFEQ

SEQ ID NO: 37 - DNA, 4675 bp, Adeno-associated virus 2
ttggccactccctctctgcgcgctcgctcgctcactgaggccgggcgaccaaaggtcgcccgacgcccgggctttgcccgggcggcctcagtgagcgagcgagcgcgcagagagggagtggccaactccatcactaggggttcctggaggggtggagtcgtgacgtgaattacgtcatagggttagggaggtcctgtattagaggtcacgtgagtgttttgcgacattttgcgacaccatgtggtcacgctgggtatttaagcccgagtgagcacgcagggtctccattttgaagcgggaggtttgaacgcgcagccgccatgccggggttttacgagattgtgattaaggtccccagcgaccttgacgggcatctgcccggcatttctgacagctttgtgaactgggtggccgagaaggaatgggagttgccgccagattctgacatggatctgaatctgattgagcaggcacccctgaccgtggccgagaagctgcagcgcgactttctgacggaatggcgccgtgtgagtaaggccccggaggcccttttctttgtgcaatttgagaagggagagagctacttccacatgcacgtgctcgtggaaaccaccggggtgaaatccatggttttgggacgtttcctgagtcagattcgcgaaaaactgattcagagaatttaccgcgggatcgagccgactttgccaaactggttcgcggtcacaaagaccagaaatggcgccggaggcgggaacaaggtggtggatgagtgctacatccccaattacttgctccccaaaacccagcctgagctccagtgggcgtggactaatatggaacagtatttaagcgcctgtttgaatctcacggagcgtaaacggttggtggcgcagcatctgacgcacgtgtcgcagacgcaggagcagaacaaagagaatcagaatcccaattctgatgcgccggtgatcagatcaaaaacttcagccaggtacatggagctggtcgggtggctcgtggacaaggggattacctcggagaagcagtggatccaggaggaccaggcctcatacatctccttcaatgcggcctccaactcgcggtcccaaatcaaggctgccttggacaatgcgggaaagattatgagcctgactaaaaccgcccccgactacctggtgggccagcagcccgtggaggacatttccagcaatcggatttataaaattttggaactaaacgggtacgatccccaatatgcggcttccgtctttctgggatgggccacgaaaaagttcggcaagaggaacaccatctggctgtttgggcctgcaactaccgggaagaccaacatcgcggaggccatagcccacactgtgcccttctacgggtgcgtaaactggaccaatgagaactttcccttcaacgactgtgtcgacaagatggtgatctggtgggaggaggggaagatgaccgccaaggtcgtggagtcggccaaagccattctcggaggaagcaaggtgcgcgtggaccagaaatgcaagtcctcggcccagatagacccgactcccgtgatcgtcacctccaacaccaacatgtgcgccgtgattgacgggaactcaacgaccttcgaacaccagcagccgttgcaagaccggatgttcaaatttgaactcacccgccgtctggatcatgactttgggaaggtcaccaagcaggaagtcaaagactttttccggtgggcaaaggatcacgtggttgaggtggagcatgaattctacgtcaaaaagggtggagccaagaaaagacccgcccccagtgacgcagatataagtgagcccaaacgggtgcgcgagtcagttgcgcagccatcgacgtcagacgcggaagcttcgatcaactacgcagacaggtaccaaaacaaatgttctcgtcacgtgggcatgaatctgatgctgtttccctgcagacaatgcgagagaatgaatcagaattcaaatatctgcttcactcacggacagaaagactgtttagagtgctttcccgtgtcagaatctcaacccgtttctgtcgtcaaaaaggcgtatcagaaactgtgctacattcatcatatcatgggaaaggtgccagacgcttgcactgcctgcgatctggtcaatgtggatttggatgactgcatctttgaacaataaatgatttaaatcaggtatggctgccgatggttatcttccagattggctcgaggacactctctctgaaggaataagacagtggtggaagctcaaacctggcccaccaccaccaaagcccgcagagcggcataaggacgacagcaggggtcttgtgcttcctgggtacaagtacctcggacccttcaacggactcgacaagggagagccggtcaacgaggcagacgccgcggccctcgagcacgtacaaagcctacgaccggcagctcgacagcggagacaacccgtacctcaagtacaaccacgccgacgcggagtttcaggagcgccttaaagaagatacgtcttttgggggcaacctcggacgagcagtcttccaggcgaaaaagagggttcttgaacctctgggcctggttgaggaacctgttaagacggctccgggaaaaaagaggccggtagagcactctcctgtggagccagactcctcctcgggaaccggaaaggcgggccagcagcctgcaagaaaaagattgaattttggtcagactggagacgcagactcagtacctgacccccagcctctcggacagccaccagcagccccctctggtctgggaactaatacgatggctacaggcagtggcgcaccaatggcagacaataacgagggcgccgacggagtgggtaattcctccggaaattggcattgcgattccacatggatgggcgacagagtcatcaccaccagcacccgaacctgggccctgcccacctacaacaaccacctctacaaacaaatttccagccaatcaggagcctcgaacgacaatcactactttggctacagcaccccttgggggtattttgacttcaacagattccactgccacttttcaccacgtgactggcaaagactcatcaacaacaactggggattccgacccaagagactcaacttcaagctctttaacattcaagtcaaagaggtcacgcagaatgacggtacgacgacgattgccaataaccttaccagcacggttcaggtgtttactgactcggagtaccagctcccgtacgtcctcggctcggcgcatcaaggatgcctcccgccgttcccagcagacgtcttcatggtgccacagtatggatacctcaccctgaacaacgggagtcaggcagtaggacgctcttcattttactgcctggagtactttccttctcagatgctgcgtaccggaaacaactttaccttcagctacacttttgaggacgttcctttccacagcagctacgctcacagccagagtctggaccgtctcatgaatcctctcatcgaccagtacctgtattacttgagcagaacaaacactccaagtggaaccaccacgcagtcaaggcttcagttttctcaggccggagcgagtgacattcgggaccagtctaggaactggcttcctggaccctgttaccgccagcagcgagtatcaaagacatctgcggataacaacaacagtgaatactcgtggactggagctaccaagtaccacctcaatggcagagactctctggtgaatccggccatggcaagccacaaggacgatgaagaaaagttttttcctcagagcggggttctcatctttgggaagcaaggctcagagaaaacaaatgtgaacattgaaaaggtcatgattacagacgaagaggaaatcggaacaaccaatcccgtggctacggagcagtatggttctgtatctaccaacctccagagaggcaacagacaagcagctaccgcagatgtcaacacacaaggcgttcttccaggcatggtctggcaggacagagatgtgtaccttcaggggcccatctgggcaaagattccacacacggacggacattttcacccctctcccctcatgggtggattcggacttaaacaccctcctccacagattctcatcaagaacaccccggtacctgcgaatccttcgaccaccttcagtgcggcaaagtttgcttccttcatcacacagtactccacgggacacggtcagcgtggagatcgagtgggagctgcagaaggaaaacagcaaacgctggaatcccgaaattcagtacacttccaactacaacaagtctgttaatcgtggacttaccgtggatactaatggcgtgtattcagagcctcgccccattggcaccagatacctgactcgtaatctgtaattgcttgttaatcaataaaccgtttaattcgtttcagttgaactttggtctctgcgtatttctttcttatctagtttccatggctacgtagataagtagcatggcgggttaatcattaactacaaggaacccctagtgatggagttggccactccctctctgcgcgctcgctcgctcactgaggccgggcgaccaaaggtcgcccgacgcccgggctttgcccgggcggcctcagtgagcgagcgagcgcgcagagagggagtggccaa

SEQ ID NO: 38 - DNA, 4679 bp, Adeno-associated virus 2
ttggccactccctctctgcgcgctcgctcgctcactgaggccgggcgaccaaaggtcgcccgacgcccgggctttgcccgggcggcctcagtgagcgagcgagcgcgcagagagggagtggccaactccatcactaggggttcctggaggggtggagtcgtgacgtgaattacgtcatagggttagggaggtcctgtattagaggtcacgtgagtgttttgcgacattttgcgacaccatgtggtcacgctgggtatttaagcccgagtgagcacgcagggtctccattttgaagcgggaggtttgaacgcgcagccgccatgccggggttttacgagattgtgattaaggtccccagcgaccttgacgggcatctgcccggcatttctgacagctttgtgaactgggtggccgagaaggaatgggagttgccgccagattctgacatggatctgaatctgattgagcaggcacccctgaccgtggccgagaagctgcagcgcgactttctgacggaatggcgccgtgtgagtaaggccccggaggcccttttctttgtgcaatttgagaagggagagagctacttccacatgcacgtgctcgtggaaaccaccggggtgaaatccatggttttgggacgtttcctgagtcagattcgcgaaaaactgattcagagaatttaccgcgggatcgagccgactttgccaaactggttcgcggtcacaaagaccagaaatggcgccggaggcgggaacaaggtggtggatgagtgctacatccccaattacttgctccccaaaacccagcctgagctccagtgggcgtggactaatatggaacagtatttaagcgcctgtttgaatctcacggagcgtaaacggttggtggcgcagcatctgacgcacgtgtcgcagacgcaggagcagaacaaagagaatcagaatcccaattctgatgcgccggtgatcagatcaaaaacttcagccaggtacatggagctggtcgggtggctcgtggacaaggggattacctcggagaagcagtggatccaggaggaccaggcctcatacatctccttcaatgcggcctccaactcgcggtcccaaatcaaggctgccttggacaatgcgggaaagattatgagcctgactaaaaccgcccccgactacctggtgggccagcagcccgtggaggacatttccagcaatcggatttataaaattttggaactaaacgggtacgatccccaatatgcggcttccgtctttctgggatgggccacgaaaaagttcggcaagaggaacaccatctggctgtttgggcctgcaactaccgggaagaccaacatcgcggaggccatagcccacactgtgcccttctacgggtgcgtaaactggaccaatgagaactttcccttcaacgactgtgtcgacaagatggtgatctggtgggaggaggggaagatgaccgccaaggtcgtggagtcggccaaagccattctcggaggaagcaaggtgcgcgtggaccagaaatgcaagtcctcggcccagatagacccgactcccgtgatcgtcacctccaacaccaacatgtgcgccgtgattgacgggaactcaacgaccttcgaacaccagcagccgttgcaagaccggatgttcaaatttgaactcacccgccgtctggatcatgactttgggaaggtcaccaagcaggaagtcaaagactttttccggtgggcaaaggatcacgtggttgaggtggagcatgaattctacgtcaaaaagggtggagccaagaaaagacccgcccccagtgacgcagatataagtgagcccaaacgggtgcgcgagtcagttgcgcagccatcgacgtcagacgcggaagcttcgatcaactacgcagacaggtaccaaaacaaatgttctcgtcacgtgggcatgaatctgatgctgtttccctgcagacaatgcgagagaatgaatcagaattcaaatatctgcttcactcacggacagaaagactgtttagagtgctttcccgtgtcagaatctcaacccgtttctgtcgtcaaaaaggcgtatcagaaactgtgctacattcatcatatcatgggaaaggtgccagacgcttgcactgcctgcgatctggtcaatgtggatttggatgactgcatctttgaacaataaatgatttaaatcaggtatggctgccgatggttatcttccagattggctcgaggacactctctctgaaggaataagacagtggtggaagctcaaacctggcccaccaccaccaaagcccgcagagcggcataaggacgacagcaggggtcttgtgcttcctgggtacaagtacctcggacccttcaacggactcgacaagggagagccggtcaacgaggcagacgccgcggccctcgagcacgacaaagcctacgaccggcagctcgacagcggagacaacccgtacctcaagtacaaccacgccgacgcggagtttcaggagcgccttaaagaagatacgtcttttgggggcaacctcggacgagcagtcttccaggcgaaaaagagggttcttgaacctctgggcctggttgaggaacctgttaagacggctccgggaaaaaagaggccggtagagcactctcctgtggagccagactcctcctcgggaaccggaaaggcgggccagcagcctgcaagaaaaagattgaattttggtcagactggagacgcagactcagtacctgacccccagcctctcggacagccaccagcagccccctctggtctgggaactaatacgatggctacaggcagtggcgcaccaatggcagacaataacgagggcgccgacggagtgggtaattcctccggaaattggcattgcgattccacatggatgggcgacagagtcatcaccaccagcacccgaacctgggccctgcccacctacaacaaccacctctacaaacaaatttccagccaatcaggagcctcgaacgacaatcactactttggctacagcaccccttgggggtattttgacttcaacagattccactgccacttttcaccacgtgactggcaaagactcatcaacaacaactggggattccgacccaagagactcaacttcaagctctttaacattcaagtcaaagaggtcacgcagaatgacggtacgacgacgattgccaataaccttaccagcacggttcaggtgtttactgactcggagtaccagctcccgtacgtcctcggctcggcgcatcaaggatgcctcccgccgttcccagcagacgtcttcatggtgccacagtatggatacctcaccctgaacaacgggagtcaggcagtaggacgctcttcattttactgcctggagtactttccttctcagatgctgcgtaccggaaacaactttaccttcagctacacttttgaggacgttcctttccacagcagctacgctcacagccagagtctggaccgtctcatgaatcctctcatcgaccagtacctgtattacttgagcagaacaaacactccaagtggaaccaccacgcagtcaaggcttcagttttctcaggccggagcgagtgacattcgggaccagtctaggaactggcttcctggaccctgttaccgccagcagcgagtatcaaagacatctgcggataacaacaacagtgaatactcgtggactggagctaccaagtaccacctcaatggcagagactctctggtgaatccgggcccggccatggcaagccacaaggacgatgaagaaaagttttttcctcagagcggggttctcatctttgggaagcaaggctcagagaaaacaaatgtggacattgaaaaggtcatgattacagacgaagaggaaatcaggacaaccaatcccgtggctacggagcagtatggttctgtatctaccaacctccagagaggcaacagacaagcagctaccgcagatgtcaacacacaaggcgttcttccaggcatggtctggcaggacagagatgtgtaccttcaggggcccatctgggcaaagattccacacacggacggacattttcacccctctcccctcatgggtggattcggacttaaacaccctcctccacagattctcatcaagaacaccccggtacctgcgaatccttcgaccaccttcagtgcggcaaagtttgcttccttcatcacacagtactccacgggacaggtcagcgtggagatcgagtgggagctgcagaaggaaaacagcaaacgctggaatcccgaaattcagtacacttccaactacaacaagtctgttaatgtggactttactgtggacactaatggcgtgtattcagagcctcgccccattggcaccagatacctgactcgtaatctgtaattgcttgttaatcaataaaccgtttaattcgtttcagttgaactttggtctctgcgtatttctttcttatctagtttccatggctacgtagataagtagcatggcgggttaatcattaactacaaggaacccctagtgatggagttggccactccctctctgcgcgctcgctcgctcactgaggccgggcgaccaaaggtcgcccgacgcccgggctttgcccgggcggcctcagtgagcgagcgagcgcgcagagagggagtggccaa

SEQ ID NO: 39 - protein, 725 aa, Adeno-associated virus 5
MAADGYLPDWLEDTLSEGIRQWWKLKPGPPPPKPAERHKDDSRGLVLPGYKYLGPFNGLDKGEPVNEADAAALEHDKAYDRQLDSGDNPYLKYNHADAEFQERLKEDTSFGGNLGRAVFQAKKRVLEPFGLVEEGAKTAPTGKRIDDHFPKRKKARTEEDSKPSTSSDAEAGPSGSQQLQIPAQPASSLGADTMSAGGGGPLGDNNQGADGVGNASGDWHCDSTWMGDRVVTKSTRTWVLPSYNNHQYREIKSGSVDGSNANAYFGYSTPWGYFDFNRFHSHWSPRDWQRLINNYWGFRPRSLRVKIFNIQVKEVTVQDSTTTIANNLTSTVQVFTDDDYQLPYVVGNGTEGCLPAFPPQVFTLPQYGYATLNRDNTENPTERSSFFCLEYFPSKMLRTGNNFEFTYNFEEVPFHSSFAPSQNLFKLANPLVDQYLYRFVSTNNTGGVQFNKNLAGRYANTYKNWFPGPMGRTQGWNLGSGVNRASVSAFATTNRMELEGASYQVPPQPNGMTNNLQGSNTYALENTMIFNSQPANPGTTATYLEGNMLITSESETQPVNRVAYNVGGQMATNNQSSTTAPTTGTYNLQEIVPGSVWMERDVYLQGPIWAKIPETGAHFHPSPAMGGFGLKHPPPMMLIKNTPVPGNITSFSDVPVSSFITQYSTGQVTVEMEWELKKENSKRWNPEIQYTNNYNDPQFVDFAPDSTGEYRTTRPIGTRYLTRPL

SEQ ID NO: 40 - protein, 644 aa, Adeno-associated virus
  MOD_RES (434)..(434): Xaa = Any amino acid
KAYDQQLKAGDNPYLRYNHADAEFQERLQEDTSFGGNLGRAVFQAKKRVLEPLGLVETPAKTAPGKKRPVDSPDSTSGIGKKGQQPAKKRLNFGQTGDSESVPDPQPIGEPPAGPSGLGSGTMAAGGGAPMADNNEGADGVGNASGNWHCDSTWLGDRVITTSTRTWALPTYNNHLYKQISSQSAGSTNDNVYFGYSTPWGYFDFNRFHCHFSPRDWQRLINNNWGFRPKKLNFKLFNIQVKEVTTNDGVTTIANNLTSTVQVFSDSEYQLPYVLGSAHQGCLPPFPADVFMIPQYGYLTLNNGSQSVGRSSFYCLEYFPSQMLRTGNNFTFSYTFEDVPFHSSYAHSQSLDRLMNPLIDQYLYYLARTQSNAGGTAGNRELQFYQGGPTTMAEQAKNWLPGPCFRQQRVSKTLDQNNNSNFAWTGATKYHLNXRNSLVNPGVAMATHKDDEERFFPSSGVLIFGKTGAANKTTLENVLMTNEEEIRPTNPVATEEYGIVSSNLQAASTAAQTQVVNNQGALPGMVWQNRDVYLQGPIWAKIPHTDGNFHPSPLMGGFGLKHPPPQILIKNTPVPANPPEVFTPAKFASFITQYSTGQVSVEIEWELQKENSKRWNPEIQYTSNFDKQTGVDFAVDSQGVYSEP

SEQ ID NO: 41 - DNA, 1933 bp, Adeno-associated virus
caaggcctacgaccagcagctcaaagcgggtgacaatccgtacctgcggtataaccacgccgacgccgagtttcaggagtgtcttcaagaagatacgtcttttgggggcaacctcgggcgagcagtcttccaggccaaaaagcgggttctcgaacctcttggtctggttgagacgccagctaagacggcacctggaaagaagcgaccggtagactcgccagactccacctcgggcatcggcaagaaaggccagcagcccgcgaaaaagagactcaactttgggcagactggcgactcagagtcagtccccgaccctcaaccaatcggagaaccaccagcaggcccctctggtctgggatctggtacaatggttgcaggcggtggcgcaccaatggctgacaataacgagggcgccgacggagtgggtaatgcctcaggaaattggcattgcgattccacatggctgggcgacagagtcatcaccaccagcacccgaacctgggccctgcccacctacaacaaccacctctacaagcaaatctccagtcagtcagcagggagcaccaacgataacgtctatttcggctacagcaccccctgggggtattttgacttcaacagattccattgccacttctcaccacgtgactggcagcgacttatcaacaacaactggggattccggcccaagaagctcaacttcaagctcttcaacatccaggtcaaggaggtcacgacgaatgacggtgtcacaaccatcgctaataaccttaccagcacggttcaggtcttttcggactcggaatatcaactgccgtacgtcctcggctccgcgcaccagggctgcctgcctccgttcccggcagacgtgttcatgattccgcagtacggatacctgactctgaacaatggcagccaatcggtaggccgttcctccttctactgcctggagtactttccttctcagatgctgagaacgggcaacaacttcacctttagctacaccttcgaggacgtgcctttccacagcagctacgcgcacagccagagtctggaccggctgatgaatcccctcatcgaccagtacctgtactacttggccagaacacagagcaacgcaggaggtactgctggcaatcgggaactgcagttttatcagggcggacctaccaccatggccgaacaagcaaagaactggctgcccggaccttgcttccggcaacagagagtatccaagacgctggatcaaaataacaacagcaactttgcctggactggtgccacaaaataccatttaaatggaagaaattcattggttaatcccggtgtcgccatggcaacccacaaggacgacgaggaacgcttctccccttcgagcggagttctaatttttggcaaaactggagcagctaataaaactacattagaaaacgtgctcatgacaaatgaagaagaaattcgtcctaccaacccggtagctaccgaggaatacgggattgtaagcagcaacttgcaggcggctagcaccgcagcccagacacaagttgttaacaaccagggagccttacctggcatggtctggcagaaccgggacgtgtacctgcaaggtcccatttgggccaagattcctcacacggacggcaactttcacccgtctcctctaatgggtggctttggactgaaacacccgcctccccagatcctgatcaaaaacacgccggtacctgctaatcctccagaagtgtttactcctgccaagtttgcttccttcatcacgcagtacagcaccgggcaagtcagcgttgagatcgagtgggagctgcagaaagagaacagcaagcgctggaacccagagattcagtacacctccaactttgacaaacagactggagtggactttgctgttgacagccagggtgtttactctgagcct

SEQ ID NO: 42 - protein, 644 aa, Adeno-associated virus
KAYDQQLKAGDNPYLRYNHADAEFQECLQEDTSFGGNLGRAVFQAKKRVLEPLGLVETPAKTAPGKKRPVDSPDSTSGIGKKGQQPAKKRLNFGQTGDSESVPDPQPIGEPPAGPSGLGSGTMVAGGGAPMADNNEGADGVGNASGNWHCDSTWLGDRVITTSTRTWALPTYNNHLYKQISSQSAGSTNDNVYFGYSTPWGYFDFNRFHCHFSPRDWQRLINNNWGFRPKKLNFKLFNIQVKEVTTNDGVTTIANNLTSTVQVFSDSEYQLPYVLGSAHQGCLPPFPADVFMIPQYGYLTLNNGSQSVGRSSFYCLEYFPSQMLRTGNNFTFSYTFEDVPFHSSYAHSQSLDRLMNPLIDQYLYYLARTQSNAGGTAGNRELQFYQGGPTTMAEQAKNWLPGPCFRQQRVSKTLDQNNNSNFAWTGATKYHLNGRNSLVNPGVAMATHKDDEERFSPSSGVLIFGKTGAANKTTLENVLMTNEEEIRPTNPVATEEYGIVSSNLQAASTAAQTQVVNNQGALPGMVWQNRDVYLQGPIWAKIPHTDGNFHPSPLMGGFGLKHPPPQILIKNTPVPANPPEVFTPAKFASFITQYSTGQVSVEIEWELQKENSKRWNPEIQYTSNFDKQTGVDFAVDSQGVYSEP

SEQ ID NO: 43 - DNA, 1933 bp, Adeno-associated virus
caaggcctacgaccagcagctcaaagcgggtgacaatccgtacctgcggtataaccacgccgacgccgagtttcaggagcgtcttcaagaagatacgtcttttgggggcaacctcgggcgagcagtcttccaggccaaaaagcgggttctcgaacctcttggtctggttgagacgccagctaagacggcacctggaaagaagcgaccggtagactcgccagactccacctcgggcatcggcaagaaaggccagcagcccgcgaaaaagagactcaactttgggcagactggcgactcagagccagtccccgaccctcaaccaatcggagaaccaccagcaggcccctctggtctgggatctggtacaatggctgcaggcggtggcgcaccaatggctgacaataacgagggcgccgacggagtgggtaatgcctcaggaaattggcattgcgattccacacggctgggcgacagagtcatcaccaccagcacccgaacctgggccctgcccacctacaacaaccacctctacaagcaaatctccagtcagtcagcagggagcaccaacgataacgtctatttcggctacagcaccccctgggggtattttgacttcaacagattccattgccacttctcaccacgtgactggcagcgacttatcaacaacaactggggattccggcccaagaagctcaacttcaagctcttcaacatccaggtcaaggaggtcacgacgaatgacggcgtcacaaccatcgctaataaccttaccagcacggttcaggtcttttcggactcggaatatcaactgccgtacgtcctcggctccgcgcaccagggctgcctgcctccgttcccggcagacgtgttcatgattccgcagtacggatacctgactctgaacaatggcagccaatcggtaggccgttcctccttctactgcctggagtactttccttctcagatgctgagaacgggcaacaacttcacctttagctacaccttcgaggacgtgcctttccacagcagctacgcgcacagccagagtctgggccggctgatgaatcccctcatcgaccagtacctgtactacttggccagaacacagagcaacgcaggaggtactgctggcaatcgggaactgcagttttatcagggcggacctaccaccatggccgaacaagcaaagaactggctgcccggaccttgcttccggcaacagagagtatccaagacgctggatcaaaataacaacagcaactttgcctggactggtgccacaaaataccatttaaatggaagaaattcattggttaatcccggtgtcgccatggcaacccacaaggacgacgaggaacgcttcttcccttcgagcggagttctaatttttggcaaaactggagcagctaataaaactacattagaaaacgtgctcatgacaaatgaagaagaaattcgtcctaccaacccggtagctaccgaggaatacgggattgtaagcagcaacttgcaggcggctagcaccgcagcccagacacaagttgttaacaaccagggagccttacctggcatggtctggcagaaccgggacgtgtacctgcaaggtcccatttgggccaagattcctcacacggacggcaactttcacccgtctcctctaatgggtggctttggactgaaacacccgcctccccagatcctgatcaaaaacacaccggtacctgctaatcctccagaagtgtttactcctgccaagtttgcttccttcatcacgcagtacagcaccgggcaagtcagcgttgagatcgaatgggagctgcagaaagagaacagcaagcgctggaacccagagattcagtacacctccaactttgacaaacagactggagtggactttgctgttgacagccagggtgtttactctgagcct

SEQ ID NO: 44 - protein, 644 aa, Adeno-associated virus
KAYDQQLKAGDNPYLRYNHADAEFQERLQEDTSFGGNLGRAVFQAKKRVLEPLGLVETPAKTAPGKKRPVDSPDSTSGIGKKGQQPAKKRLNFGQTGDSEPVPDPQPIGEPPAGPSGLGSGTMAAGGGAPMADNNEGADGVGNASGNWHCDSTRLGDRVITTSTRTWALPTYNNHLYKQISSQSAGSTNDNVYFGYSTPWGYFDFNRFHCHFSPRDWQRLINNNWGFRPKKLNFKLFNIQVKEVTTNDGVTTIANNLTSTVQVFSDSEYQLPYVLGSAHQGCLPPFPADVFMIPQYGYLTLNNGSQSVGRSSFYCLEYFPSQMLRTGNNFTFSYTFEDVPFHSSYAHSQSLGRLMNPLIDQYLYYLARTQSNAGGTAGNRELQFYQGGPTTMAEQAKNWLPGPCFRQQRVSKTLDQNNNSNFAWTGATKYHLNGRNSLVNPGVAMATHKDDEERFFPSSGVLIFGKTGAANKTTLENVLMTNEEEIRPTNPVATEEYGIVSSNLQAASTAAQTQVVNNQGALPGMVWQNRDVYLQGPIWAKIPHTDGNFHPSPLMGGFGLKHPPPQILIKNTPVPANPPEVFTPAKFASFITQYSTGQVSVEIEWELQKENSKRWNPEIQYTSNFDKQTGVDFAVDSQGVYSEP

SEQ ID NO: 45 - DNA, 1933 bp, Adeno-associated virus; identical to SEQ ID NO: 43

SEQ ID NO: 46 - protein, 644 aa, Adeno-associated virus; identical to SEQ ID NO: 44

SEQ ID NO: 47 - DNA, 1933 bp, Adeno-associated virus
caaggcctacgaccagcagctcaaagcgggtgacaatccgtacctgcggtataaccacgccgacgccgagtttcaggagcgtcttcaagaagatacgtcttttgggggcaacctcgggcgagcagtcttccaggccaaaaagcgggttctcgaacctcttggtctggttgagacgccagctaagacggcacctggaaagaagcgaccggtagactcgccagactccacctcgggcatcggcaagaaaggccagcagcccgcgaaaaagagactcaactttgggcagactggcgactcagagtcagtccccgaccctcaaccaatcggagaaccaccagcaggcccctctggtctgggatctggtacaatggctgcaggcggtggcgcaccaatggctgacaatagcgagggcgccgacggagtgggtaatgcctcaggaaattggcattgcgattccacatggctgggcgacagagtcatcaccaccagcacccgaacctgggccctgcccacctacaacaaccacctctacaagcaaatctccagtcagtcagcagggagcaccaacgataacgtctatttcggctacagcaccccctgggggtattttgacttcaacagattccattgccacttctcaccacgtgactggcagcgacttatcaacaacaactggggattccggcccaagaagctcaacttcaagctcttcaacatccaggtcaaggaggtcacgacgaatgacggtgtcacaaccatcgctaataaccttaccagcacggttcaggtcttttcggactcggaatatcaactgccgtacgtcctcggctccgcgcaccagggctgcctgcctccgttcccggcagacgtgttcatgattccgcagtacggatacctgactctgaacaatggcagccaatcggtaggccgttcctccttctactgcctggagtactttccttctcagatgctgagaacgggcaacaacttcacctttagctacaccttcgaggacgtgcctttccacagcagctacgcgcacagccagagtctggaccggctgatgaatcccctcatcgaccagtacctgtactacttggccagaacacagagcaacgcaggaggtactgctggcaatcgggaactgcagttttatcagggcggacctaccaccatggccgaacaagcaaagaactggctgcccggaccttgcttccggcaacagagagtatccaagacgctggatcaaaataacaacagcaactttgcctggactggtgccacaaaataccatttaaatggaagaaattcattggttaatcccggtgtcgccatggcaacccacaaggacgacgaggaacgcttcttcccttcgagcggagttctaatttttggcaaaactggagcagctaataaaactacattagaaaacgtgctcatgacaaatgaagaagaaattcgtcctaccaacccggtagctaccgaggaatacgggattgtaagcagcaacttgcaggcggctagcaccgcagcccagacacaagttgttaacaaccagggagccttacctggcatggtctggcagaaccgggacgtgtacctgcaaggtcccatttgggccaagattcctcacacggacggcaactttcacccgtctcctctaatgggtggctttggactgaaacacccgcctccccagatcctgatcaaaaacacaccggtacctgctaatcctccagaagtgtttactcctgccaagcttgcttccttcatcacgcagtacagcaccgggcaagtcagcgttgagatcgagtgggagctgcagaaagagaacagcaagcgctggaacccagagattcagtacacctccaactttgacaaacagactggagtggactttgctgttgacagccagggtgtttactctgagcct

SEQ ID NO: 48 - protein, 644 aa, Adeno-associated virus
KAYDQQLKAGDNPYLRYNHADAEFQERLQEDTSFGGNLGRAVFQAKKRVLEPLGLVETPAKTAPGKKRPVDSPDSTSGIGKKGQQPAKKRLNFGQTGDSESVPDPQPIGEPPAGPSGLGSGTMAAGGGAPMADNSEGADGVGNASGNWHCDSTWLGDRVITTSTRTWALPTYNNHLYKQISSQSAGSTNDNVYFGYSTPWGYFDFNRFHCHFSPRDWQRLINNNWGFRPKKLNFKLFNIQVKEVTTNDGVTTIANNLTSTVQVFSDSEYQLPYVLGSAHQGCLPPFPADVFMIPQYGYLTLNNGSQSVGRSSFYCLEYFPSQMLRTGNNFTFSYTFEDVPFHSSYAHSQSLDRLMNPLIDQYLYYLARTQSNAGGTAGNRELQFYQGGPTTMAEQAKNWLPGPCFRQQRVSKTLDQNNNSNFAWTGATKYHLNGRNSLVNPGVAMATHKDDEERFFPSSGVLIFGKTGAANKTTLENVLMTNEEEIRPTNPVATEEYGIVSSNLQAASTAAQTQVVNNQGALPGMVWQNRDVYLQGPIWAKIPHTDGNFHPSPLMGGFGLKHPPPQILIKNTPVPANPPEVFTPAKLASFITQYSTGQVSVEIEWELQKENSKRWNPEIQYTSNFDKQTGVDFAVDSQGVYSEP

SEQ ID NO: 49 - DNA, 1933 bp, Adeno-associated virus
caaggcctacgaccagcagctcaaagcgggtgacaatccgtacctgcggtataaccacgccgacgccgagtttcaggagcgtcttcaagaagatacgtcttttgggggcaacctcgggcgagcagtcttccaggccaaaaagcgggttctcgaacctcttggtctggttgagacgccagctaagacggcacctggaaagaagcgaccggtagactcgccagactccacctcgggcatcggcaagaaaggccagcagcccgcgaaaaagagactcaactttgggcagactggcgactcagagtcagtccccgaccctcaaccaatcggagaaccaccagcaggcccctctggtctgggatctggtacaatggctgcaggcggtggcgcaccaatggctgacaataacgagggcgccgacggagtgggtaatgcctcaggaaattggcattgcgattccacatggctgggcgacagagtcatcaccaccagcacccgaacctgggccctgcccacctacaacaaccacctctacaagcaaatctccagtcagtcagcagggagcaccaacgataacgtctatttcggctacagcaccccctgggggtattttgacttcaacagattccattgccacttctcaccacgtgactggcagcgacttatcaacaacaactggggattccggcccaagaagctcaacttcaagctcttcaacatccaggtcaaggaggtcacgacgaatgacggcgtcacaaccatcgctaataaccttaccagcacggttcaggtcttttcggacccggaatatcaactgccgtacgtcctcggctccgcgcaccagggctgcctgcctccgttcccggcagacgtgttcatgattccgcagtacggatacctgactctgaacaatggcagccaatcggtaggccgttcctccttctactgcctggagtactttccttctcagatgctgagaacgggcaacaacttcacctttagctacaccttcgaggacgtgcctttccacagcagctacgcgcacagccagagtctggaccggctgatgaatcccctcatcgaccagtacctgtactacttggccagaacacagagcaacgcaggaggtactgctggcaatcgggaactgcagttttatcagggcggacctaccaccatggccgaacaagcaaagaactggctgcccggaccttgcttccggcaacagagagtatccaagacgctggatcaaaataacaacagcaactttgcctggactggtgccacaaaataccatttaaatggaagaaattcattggttaatcccggtgtcgccatggcaacccacaaggacgacgaggaacgcttcttcccttcgagcggagttctaatttttggcaaaactggagcagctaataaaactacattagaaaacgtgctcatgacaaatgaagaagaaattcgtcctaccaacccggtagctaccgaggaatacgggattgtaagcagcaacttgcaggcggctagcaccgcagcccagacacaagttgttaacaaccagggagccttacctggcatggtctggcagaaccgggacgtgtacctgcaaggtcccatttgggccaagattcctcacacggacggcaactttcacccgtctcctctaatgggtggctttggactgaaacacccgcctccccagatcctgatcaaaaacacaccggtacctgctaatcctccagaagtgtttactcctgccaagattgcttccttcatcacgcagtacagcaccgggcaagtcagcgttgagatcgagtgggagctgcagaaagagaacagcaagcgctggaacccagagattcagtacacctccaactttgacaaacagactggagtggactttgctgttgacagccagggtgtttactctgagcct

SEQ ID NO: 50 - protein, 644 aa, Adeno-associated virus
KAYDQQLKAGDNPYLRYNHADAEFQERLQEDTSFGGNLGRAVFQAKKRVLEPLGLVETPAKTAPGKKRPVDSPDSTSGIGKKGQQPAKKRLNFGQTGDSESVPDPQPIGEPPAGPSGLGSGTMAAGGGAPMADNNEGADGVGNASGNWHCDSTWLGDRVITTSTRTWALPTYNNHLYKQISSQSAGSTNDNVYFGYSTPWGYFDFNRFHCHFSPRDWQRLINNNWGFRPKKLNFKLFNIQVKEVTTNDGVTTIANNLTSTVQVFSDPEYQLPYVLGSAHQGCLPPFPADVFMIPQYGYLTLNNGSQSVGRSSFYCLEYFPSQMLRTGNNFTFSYTFEDVPFHSSYAHSQSLDRLMNPLIDQYLYYLARTQSNAGGTAGNRELQFYQGGPTTMAEQAKNWLPGPCFRQQRVSKTLDQNNNSNFAWTGATKYHLNGRNSLVNPGVAMATHKDDEERFFPSSGVLIFGKTGAANKTTLENVLMTNEEEIRPTNPVATEEYGIVSSNLQAASTAAQTQVVNNQGALPGMVWQNRDVYLQGPIWAKIPHTDGNFHPSPLMGGFGLKHPPPQILIKNTPVPANPPEVFTPAKIASFITQYSTGQVSVEIEWELQKENSKRWNPEIQYTSNFDKQTGVDFAVDSQGVYSEP

SEQ ID NO: 51 - protein, 738 aa, Adeno-associated virus
MAADGYLPDWLEDNLSEGIREWWALKPGAPKPKANQQKQDDGRGLVLPGYKYLGPFNGLDKGEPVNAADAAALEHDKAYDQQLKAGDNPYLRYNHADAEFQERLQEDTSFGGNLGRAVFQAKKRVLEPLGLVEEGAKTAPGKKRPVEPSPQRSPDSTTGIGKKGQQPAKKRLNFGQTGDSESVPDPQPIGEPPAGPSGLGSGTMAAGGGAPMADNNEGADGVGSSSGNWHCDSTWLGDRVITTSTRTWALPTYNNHLYKQISNGTSGGSTNDNTYFGYSTPWGYFDFNRFHCHFSPRDWQRLINNNWGFRPKRLNFKLFNIQVKEVTQNEGTKTIANNLTSTIQVFTDSEYQLPYVLGSARQGCLPPFPADVFMIPQYGYLTLNNGSQAVGRSSFYCLEYFPSQMLRTGNNFEFSYQFEDVPFHSSYAHSQSLDRLMNPLIDQYLYYLSRTQSTGGTAGTQQLLFSQAGPNNMSAQAKNWLPGPCYRQQRVSTTLSQNNNSNFAWTGATKYHLNGRDSLVNPGVAMATHKDDEERFFPSSGVLMFGKQGAGKGNVDYSSVMLTSEEEIKTTNPVATEQYGVVADNLQQQNAAPIVGAVNSQGALPGMVWQNRDVYLQGPIWAKIPHTDGNFHPSPLMGGFGLKHPPPQILIKNTPVPADPPTTFSQAKLASFITQYSTGQVSVEIEWELQKENSKRWNPEIQYTSNYYKSTNVDFAVNTDGTYSEPRPIGTRYLTRNL

SEQ ID NO: 52 - DNA, 3121 bp, Adeno-associated virus
gaattcgcccttctacggctgcgtcaactggaccaatgagaactttcccttcaacgactgtgtcgacaagatggtgatctggtgggaggaggggaagatgaccgccaaggtcgtggagtcggccaaagccattctcggaggaagcaaggtgcgcgtggaccagaaatgcaagtcctcggcccagatagacccgactcccgtgatcgtcacctccaacaccaacatgtgcgccgtgattgacgggaactcaacgaccttcgaacaccagcagccgttgcaagaccggatgttcaaatttgaactcacccgccgtctggatcatgactttgggaaggtcaccaagcaggaagtcaaagactttttccggtgggcaaaggatcacgtggttgaggtggagcacgaattctacgtcaaaaagggtggagccaagaaaagacccgcccccagtgacgcagatataagtgagcccaaacgggtgcgcgagtcagttgcgcagccatcgacgtcagacgcggaagcttcgatcaactacgcagacaggtaccaaaacaaatgttctcgtcacgcgggcatgaatctgatgctgtttccctgcagacaatgcgagagaatgaatcagaattcaaatatctgcttcactcacggacagaaagactgtttagagtgctttcccgtgtcagaatctcaacccgtttctgtcgtcaaaaaggcgtatcagaaactgtgctacattcatcatatcatgggaaaggtgccagacgcttgcactgcctgcgatctggtcgatgtggatttggatgactgcatctttgaacaataaatgatttaaatcaggtatggctgccgatggttatcttccagattggctcgaggacaacctctctgagggcattcgcgagtggtgggcgctgaaacctggagccccgaagcccaaagccaaccagcaaaagcaggacggcggccggggtctggtgcttcctggctacaagtacctcggacccttcaacggactcgacaagggggagcccgtcaacgcggcggacgcagcggccctcgagcacgacaaggcctacgaccagcagctcaaagcgggtgacaatccgtacctgcggtataaccacgccgacgccgagtttcaggagcgtctgcaagaagatacgtcttttgggggcaacctcgggcgagcagtcttccaggccaagaagcgggttctcgaacctctcggtctggttgaggaaggcgctaagacggctcctggaaagaagagaccggtagagccatcaccccagcgttctccagactcctctacgggcatcggcaagaaaggccagcagcccgcgaaaaagagactcaactttgggcagactggcgactcagagtcagtgcccgaccctcaaccaatcggagaaccccccgcaggcccctctggtctgggatctggtacaatggctgcaggcggtggcgctccaatggcagacaataacgaaggcgccgacggagtgggtagttcctcaggaaattggcattgcgattccacatggctgggcgactgagtcatcaccaccagcacccgaacctgggccctccccacctacaacaaccacctctacaagcaaatctccaacgggacttcgggaggaagcaccaacgacaacacctacttcggctacagcaccccctgggggtattttgactttaacagattccactgccacttctcaccacgtgactggcagcgactcatcaacaacaactggggattccggcccaagagactcaacttcaagctcttcaacatccaggtcaaggaggtcacgcagaatgaaggcaccaagaccatcgccaataaccttaccagcacgattcaggtctttacggactcggaataccagctcccgtacgtcctcggctctgcgcaccagggctgcctgcctccgttcccggcggacgtcttcatgattcctcagtacgggtacctgactctgaacaatggcagtcaggccgtgggccgttcctccttctactgcctggagtactttccttctcaaatgctgagaacgggcaacaactttgagttcagctaccagtttgaggacgtgccttttcacagcagctacgcgcacagccaaagcctggaccggctgatgaaccccctcatcgaccagtacctgtactacctgtctcggactcagtccacgggaggtaccgcaggaactcagcagttgctattttctcaggccgggcctaataacatgtcggctcaggccaaaaactggctacccgggccctgctaccggcagtaacgcgtctccacgacactgtcgcaaaataacaacagcaactttgtctggaccggtgccaccaagtatcatctgaatggcagagactctctggtagatcccggtgtcgctatggcaacccacaaggacgacgaagagcgattttttccgtccagcggagtcataatgtttgggaaacagggagctggaaaagacaacgtggactatagcagcgtcatgctaaccagtgaggaagaaattaaaaccaccaacccagtggccacagaacagtacggcgtggtggccgataacctgcaacagcaaaacgccgctcctattgtaggggccgtcaacagtcaaggagccttacctggcatggtctggcagaaccgggacgtgtacctgcagggtcctacctgggccaagattcctcacacggacggaaactttcatccctcgccgctgatgggaggctttggactgaaacacccgcctcctcagatcctgattaagaatacacctgttcccgcggatcctccaactaccttcagtcaagctaagctggcgtcgttcatcacgcagtacagcaccggacaggtcagcgtggaaattgaatgggagctgcaggaagaaaacagcaaacgctggaacccagagattcaatacacttccaactactacaaatctacaaatgtggactttgctgttaacacagatggcacttattctgagcctcgccccatcggcacccgttacctcacccgtaatctgtaattgcttgttaatcaataaaccggttgattcgtttcagttgaactttggtctctgcgaagggcgaattc

SEQ ID NO: 53 - protein, 738 aa, Adeno-associated virus
MAADGYLPDWLEDNLSEGIREWWALKPGAPKPKANQQKQDDGRGLVLPGYKYLGPFNGLDKGEPVNAADAAALEHDKAYDQQLKAGDNPYLRYNHADAEFQERLQEDTSFGGNLGRAVFQAKKRVLEPLGLVEEGAKTAPGKKRPVEPSPQRSPDSSTGIGKKGQQPAKKRLNFGQTGDSESVPDPQPIGEPPAGPSGLGSGTMAAGGGAPMADNNEGADGVGSSSGNWHCDSTWLGDGVITTSTRTWALPTYNNHLYKQISNGTSGGSTNDNTYFGYSTPWGYFDFNRFHCHFSPRDWQRLINNNWGFRPKSLNFKLFNIQVKEVTQNEGTKTIANNLTSTIQVFTDSEYQLPYVLGSAHQGCLPPFPADVFMIPQYGYLTLNNGSQAVGRSSFYCLEYFPSQMLRTGNNFEFSYQFEDVPFHSSYAHSQSLDRLMNPLIDQYLYYLSRTQSTGGTAGTQQLLFSQAGPNNMSAQAKNWLPGPCYRQQRVSTTLSQNDNSNFAWTGATKYHLNGRDSLVNPGVAMATHKDDEERFFPSSGVLMFGKQGAGKDNVDYSSVMLTSEEEIKTTNPVATEQYGVVADNLQQQNAAPIVGAVNSQGALPGMVWQNRDVYLQGPIWAKIPHTDGNFHPSPLMGGFGLKHPPPQILIKNTPVPADPPTTFSQAKLASFITQYSTGQVSVEIEWELQKENSKRWNPEIQYTSNYYKSTNVDFAVNTDGTYSEPRPIGTRYLTRNL

SEQ ID NO: 54 - DNA, 3121 bp, Adeno-associated virus
gaattcgcccttcgcgagaccaaagttcaactgaaacgaatcaaccggtttattgattaacaagcaattacagattacgggtgaggtaacgggtgccgatggggcgaggctcagaataagtgccatctgtgttaacagcaaagtccacatttgtagatttgtagtagttggaagtgtattgaatctctgggttccagcgtttgctgttttctttctgcagctcccattcaatttccacgctgacctgtccggtgctgtactgcgtgatgaacgacgccagcttagcttgactgaaggtagttggaggatccgcgggaacaggtgtattcttaatcaggatctgaggaggcgggtgtttcagtccaaagcctcccatcagcggcgagggatgaaagtttccgtccgtgtgaggaatcttggcccagataggaccctgcaggtacacgtcccggttctgccagaccatgccaggtaaggctccttgactgttgacggcccctacaataggagcggcgttttgctgttgcaggttatcggccaccacgccgtactgttctgtggccactgggttggtggttttaatttcttcctcactggttagcataacgctgctatagtccacgttgtcttttccagctccctgtttcccaaacattaagactccgctggacggaaaaaatcgctcttcgtcgtccttgtgggttgccatagcgacaccgggatttaccagagagtctctgccattcagatgatacttggtggcaccggtccaggcaaagttgctgttgtcattttgcgacagtgtcgtggagacgcgttgctgccggtagcagggcccgggtagccagtttttggcctgagccgacatgttattaggcccggcctgagaaaatagcaactgctgagttcctgcggtacctcccgtggactgagtccgagacaggtagtacaggtactggtcgatgagggggttcatcagccggtccaggctttggctgtgcgcgtagctgctgtgaaaaggcacgtcctcaaactggtagctgaactcaaagttgttgcccgttctcagcatttgagaaggaaagtactccaggcagtagaaggaggaacggcccacggcctgactgccattgttcagagtcaggtacccgtactgaggaatcatgaagacgtccgccgggaacggaggcaggcagccctggtgcgcagagccgaggacgtacgggagctggtattccgagtccgtaaagacctgaatcgtgctggtaaggttattggcgatggtcttggtgccttcattctgcgtgacctccttgacctggatgttgaagagcttgaagttgaggctcttgggccggaatccccagttgttgttgatgagtcgctgccagtcacgtggtgagaagtggcagtggaatctgttaaagtcaaaatacccccagggggtgctgtagccgaagtaggtgttgtcgttggtgcttcctcccgaagtcccgttggagatttgcttgtagaggtggttgttgtaggtggggagggcccaggttcgggtgctggtggtgatgactccgtcgcccagccatgtggaatcgcaatgccaatttcctgaggaactacccactccgtcggcgccttcgttattgtctgccattggagcgccaccgcctgcagccattgtaccagatcccagaccagaggggcctgcggggggttctccgattggttgagggtcgggcactgactctgagtcgccagtctgcccaaagttgagtctctttttcgcgggctgctggcctttcttgccgatgcccgtagaggagtctggagaacgctggggtgatggctctaccggtctcttctttccaggagccgtcttagcgccttcctcaaccagaccgagaggttcgagaacccgcttcttggcctggaagactgctcgcccgaggttgcccccaaaagacgtatcttcttgcagacgctcctgaaactcggcgtcggcgtggttataccgcaggtacggattgtcacccgctttgagctgctggtcgtaggccttgtcgtgctcgagggccgctgcgtccgccgcgttgacgggctcccccttgtcgagtccgttgaagggtccgaggtacttgtagccaggaagcaccagaccccggccgtcgtcctgcttttgctggttggctttgggcttcggggctccaggtttcagcgcccaccactcgcgaatgccctcagagaggttgtcctcgagccaatctggaagataaccatcggcagccatacctgatttaaatcatttattgttcaaagatgcagtcatccaaatccacattgaccagatcgcaggcagtgcaagcgtctggcacctttcccatgatatgatgaatgtagcacagtttctgatacgcctttttgacgacagaaacgggttgagattctgacacgggaaagcactctaaacagtctttctgtccgtgagtgaagcagatatttgaattctgattcattctctcgcattgtctgcagggaaacagcatcagattcatgcccacgtgacgagaacatttgttttggtacctgtctgcgtagttgatcgaagcttccgcgtctgacgtcgatggctgcgcaactgactcgcgcacccgtttgggctcacttatatctgcgtcactgggggcgggtcttttcttggctccaccctttttgacgtagaattcatgctccacctcaaccacgtgatcctttgcccaccggaaaaagtctttgacttcctgcttggtgaccttcccaaagtcatgatccagacggcgggtgagttcaaatttgaacatccggtcttgcaacggctgctggtgttcgaaggtcgttgagttcccgtcaatcacggcgcacatgttggtgttggaggtgacgatcacgggagtcgggtctatctgggccgaggacttgcatttctggtccacgcgcaccttgcttcctccgagaatggctttggccgactccacgaccttggcggtcatcttcccctcctcccaccagatcaccatcttgtcgacacagtcgttgaagggaaagttctcattggtccagttgacgcagccgtagaaagggcgaattc

SEQ ID NO: 55 - DNA, 2211 bp, Adeno-associated virus
atggctgctgacggttatcttccagattggctcgaggacaacctttctgaaggcattcgtgagtggtgggctctgaaacctggagtccctcaacccaaagcgaaccaacaacaccaggacaaccgtcggggtcttgtgcttccgggttacaaatacctcggacccggtaacggactcgacaaaggagagccggtcaacgaggcggacgcggcagccctcgaacacgacaaagcttacgaccagcagctcaaggccggtgacaacccgtacctcaagtacaaccacgccgacgccgagtttcaggagcgtcttcaagaagatacgtcttttgggggcaaccttggcagagcagtcttccaggccaaaaagaggatccttgagcctcttggtctggttgaggaagcagctaaaacggctcctggaaagaagggggctgtagatcagtctcctcaggaaccggactcatcatctggtgttggcaaatcgggcaaacagcctgccagaaaaagactaaatttcggtcagactggagactcagagtcagtcccagaccctcaacctctcggagaaccaccagcagcccccacaagtttgggatctaatacaatggcttcaggcggtggcgcaccaatggcagacaataacgagggtgccgatggagtgggtaattcctcaggaaattggcattgcgattcccaatggctgggcgacagagtcatcaccaccagcaccagaacctgggccctgcccacttacaacaaccatctctacaagcaaatctccagccaatcaggagcttcaaacgacaaccactactttggctacagcaccccttgggggtattttgactttaacagattccactgccacttctcaccacgtgactggcagcgactcattaacaacaactggggattccggcccaagaaactcagcttcaagctcttcaacatccaagttagaggggtcacgcagaacgatggcacgacgactattgccaataaccttaccagcacggttcaagtgtttacggactcggagtatcagctcccgtacgtgctcgggtcggcgcaccaaggctgtctcccgccgtttccagcggacgtcttcatggtccctcagtatggatacctcaccctgaacaacggaagtcaagcggtgggacgctcatccttttactgcctggagtacttcccttcgcagatgctaaggactggaaataacttccaattcagctataccttcgaggatgtaccttttcacagcagctacgctcacagccagagtttggatcgcttgatgaatcctcttattgatcagtatctgtactacctgaacagaacgcaaggaacaacctctggaacaaccaaccaatcacggctgctttttagccaggctgggcctcagtctatgtctttgcaggccagaaattggctacctgggccctgctaccggcaacagagactttcaaagactgctaacgacaacaacaacagtaactttccttggacagcggccagcaaatatcatctcaatggccgcgactcgctggtgaatccaggaccagctatggccagtcacaaggacgatgaagaaaaatttttccctatgcacggcaatctaatatttggcaaagaagggacaacggcaagtaacgcagaattagataatgtaatgattacggatgaagaagagattcgtaccaccaatcctgtggcaacagagcagtatggaactgtggcaaataacttgcagagctcaaatacagctcccacgactggaactgtcaatcatcagggggccttacctggcatggtgtggcaagatcgtgacgtgtaccttcaaggacctatctgggcaaagattcctcacacggatggacactttcatccttctcctctgatgggaggctttggactgaaacatccgcctcctcaaatcatgatcaaaaatactccggtaccggcaaatcctccgacgactttcagcccggccaagtttgcttcatttatcactcagtactccactggacaggtcagcgtggaaattgagtgggagctacagaaagaaaacagcaaacgttggaatccagagattcagtacacttccaactacaacaagtctgttaatgtggactttactgtagacactaatggtgtttatagtgaacctcgccctattggaacccggtatctcacacgaaacttgtga

SEQ ID NO: 56 - protein, 736 aa, Adeno-associated virus 3
MAADGYLPDWLEDNLSEGIREWWALKPGVPQPKANQQHQDNRRGLVLPGYKYLGPGNGLDKGEPVNEADAAALEHDKAYDQQLKAGDNPYLKYNHADAEFQERLQEDTSFGGNLGRAVFQAKKRILEPLGLVEEAAKTAPGKKGAVDQSPQEPDSSSGVGKSGKQPARKRLNFGQTGDSESVPDPQPLGEPPAAPTSLGSNTMASGGGAPMADNNEGADGVGNSSGNWHCDSQWLGDRVITTSTRTWALPTYNNHLYKQISSQSGASNDNHYFGYSTPWGYFDFNRFHCHFSPRDWQRLINNNWGFRPKKLSFKLFNIQVRGVTQNDGTTTIANNLTSTVQVFTDSEYQLPYVLGSAHQGCLPPFPADVFMVPQYGYLTLNNGSQAVGRSSFYCLEYFPSQMLRTGNNFQFSYTFEDVPFHSSYAHSQSLDRLMNPLIDQYLYYLNRTQGTTSGTTNQSRLLFSQAGPQSMSLQARNWLPGPCYRQQRLSKTANDNNNSNFPWTAASKYHLNGRDSLVNPGPAMASHKDDEEKFFPMHGNLIFGKEGTTASNAELDNVMITDEEEIRTTNPVATEQYGTVANNLQSSNTAPTTGTVNHQGALPGMVWQDRDVYLQGPIWAKIPHTDGHFHPSPLMGGFGLKHPPPQIMIKNTPVPANPPTTFSPAKFASFITQYSTGQVSVEIEWELQKENSKRWNPEIQYTSNYNKSVNVDFTVDTNGVYSEPRPIGTRYLTRNL

SEQ ID NO: 57 - DNA, 4726 bp, Adeno-associated virus 3
ttggccactccctctatgcgcactcgctcgctcggtggggcctggcgaccaaaggtcgccagacggacgtgctttgcacgtccggccccaccgagcgagcgagtgcgcatagagggagtggccaactccatcactagaggtatggcagtgacgtaacgcgaagcgcgcgaagcgagaccacgcctaccagctgcgtcagcagtcaggtgacccttttgcgacagtttgcgacaccacgtggccgctgagggtatatattctcgagtgagcgaaccaggagctccattttgaccgcgaaatttgaacgagcagcagccatgccggggttctacgagattgtcctgaaggtcccgagtgacctggacgagcgcctgccgggcatttctaactcgtttgttaactgggtggccgagaaggaatgggacgtgccgccggattctgacatggatccgaatctgattgagcaggcacccctgaccgtggccgaaaagcttcagcgcgagttcctggtggagtggcgccgcgtgagtaaggccccggaggccctcttttttgtccagttcgaaaagggggagacctacttccacctgcacgtgctgattgagaccatcggggtcaaatccatggtggtcggccgctacgtgagccagattaaagagaagctggtgacccgcatctaccgcggggtcgagccgcagcttccgaactggttcgcggtgaccaaaacgcgaaatggcgccgggggcgggaacaaggtggtggacgactgctacatccccaactacctgctccccaagacccagcccgagctccagtgggcgtggactaacatggaccagtatttaagcgcctgtttgaatctcgcggagcgtaaacggctggtggcgcagcatctgacgcacgtgtcgcagacgcaggagcagaacaaagagaatcagaaccccaattctgacgcgccggtcatcaggtcaaaaacctcagccaggtacatggagctggtcgggtggctggtggaccgcgggatcacgtcagaaaagcaatggattcaggaggaccaggcctcgtacatctccttcaacgccgcctccaactcgcggtcccagatcaaggccgcgctggacaatgcctccaagatcatgagcctgacaaagacggctccggactacctggtgggcagcaacccgccggaggacattaccaaaaatcggatctaccaaatcctggagctgaacgggtacgatccgcagtacgcggcctccgtcttcctgggctgggcgcaaaagaagttcgggaagaggaacaccatctggctctttgggccggccacgacgggtaaaaccaacatcgcggaagccatcgcccacgccgtgcccttctacggctgcgtaaactggaccaatgagaactttcccttcaacgattgcgtcgacaagatggtgatctggtgggaggagggcaagatgacggccaaggtcgtggagagcgccaaggccattctgggcggaagcaaggtgcgcgtggaccaaaagtgcaagtcatcggcccagatcgaacccactcccgtgatcgtcacctccaacaccaacatgtgcgccgtgattgacgggaacagcaccaccttcgagcatcagcagccgctgcaggaccggatgtttgaatttgaacttacccgccgtttggaccatgactttgggaaggtcaccaaacaggaagtaaaggactttttccggtgggcttccgatcacgtgactgacgtggctcatgagttctacgtcagaaagggtggagctaagaaacgccccgcctccaatgacgcggatgtaagcgagccaaaacgggagtgcacgtcacttgcgcagccgacaacgtcagacgcggaagcaccggcggactacgcggacaggtaccaaaacaaatgttctcgtcacgtgggcatgaatctgatgctttttccctgtaaaacatgcgagagaatgaatcaaatttccaatgtctgttttacgcatggtcaaagagactgtggggaatgcttccctggaatgtcagaatctcaacccgtttctgtcgtcaaaaagaagacttatcagaaactgtgtccaattcatcatatcctgggaagggcacccgagattgcctgttcggcctgcgatttggccaatgtggacttggatgactgtgtttctgagcaataaatgacttaaaccaggtatggctgctgacggttatcttccagattggctcgaggacaacctttctgaaggcattcgtgagtggtgggctctgaaacctggagtccctcaacccaaagcgaaccaacaacaccaggacaaccgtcggggtcttgtgcttccgggttacaaatacctcggacccggtaacggactcgacaaaggagagccggtcaacgaggcggacgcggcagccctcgaacacgacaaagcttacgaccagcagctcaaggccggtgacaacccgtacctcaagtacaaccacgccgacgccgagtttcaggagcgtcttcaagaagatacgtcttttgggggcaaccttggcagagcagtcttccaggccaaaaagaggatccttgagcctcttggtctggttgaggaagcagctaaaacggctcctggaaagaagggggctgtagatcagtctcctcaggaaccggactcatcatctggtgttggcaaatcgggcaaacagcctgccagaaaaagactaaatttcggtcagactggagactcagagtcagtcccagaccctcaacctctcggagaaccaccagcagcccccacaagtttgggatctaatacaatggcttcaggcggtggcgcaccaatggcagacaataacgagggtgccgatggagtgggtaattcctcaggaaattggcattgcgattcccaatggctgggcgacagagtcatcaccaccagcaccagaacctgggccctgcccacttacaacaaccatctctacaagcaaatctccagccaatcaggagcttcaaacgacaaccactactttggctacagcaccccttgggggtattttgactttaacagattccactgccacttctcaccacgtgactggcagcgactcattaacaacaactggggattccggcccaagaaactcagcttcaagctcttcaacatccaagttagaggggtcacgcagaacgatggcacgacgactattgccaataaccttaccagcacggttcaagtgtttacggactcggagtatcagctcccgtacgtgctcgggtcggcgcaccaaggctgtctcccgccgtttccagcggacgtcttcatggtccctcagtatggatacctcaccctgaacaacggaagtcaagcggtgggacgctcatccttttactgcctggagtacttcccttcgcagatgctaaggactggaaataacttccaattcagctataccttcgaggatgtaccttttcacagcagctacgctcacagccagagtttggatcgcttgatgaatcctcttattgatcagtatctgtactacctgaacagaacgcaaggaacaacctctggaacaaccaaccaatcacggctgctttttagccaggctgggcctcagtctatgtctttgcaggccagaaattggctacctgggccctgctaccggcaacagagactttcaaagactgctaacgacaacaacaacagtaactttccttggacagcggccagcaaatatcatctcaatggccgcgactcgctggtgaatccaggaccagctatggccagtcacaaggacgatgaagaaaaatttttccctatgcacggcaatctaatatttggcaaagaagggacaacggcaagtaacgcagaattagataatgtaatgattacggatgaagaagagattcgtaccaccaatcctgtggcaacagagcagtatggaactgtggcaaataacttgcagagctcaaatacagctcccacgactggaactgtcaatcatcagggggccttacctggcatggtgtggcaagatcgtgacgtgtaccttcaaggacctatctgggcaaagattcctcacacggatggacactttcatccttctcctctgatgggaggctttggactgaaacatccgcctcctcaaatcatgatcaaaaatactccggtaccggcaaatcctccgacgactttcagcccggccaagtttgcttcatttatcactcagtactccactggacaggtcagcgtggaaattgagtgggagctacagaaagaaaacagcaaacgttggaatccagagattcagtacacttccaactacaacaagtctgttaatgtggactttactgtagacactaatggtgtttatagtgaacctcgccctattggaacccggtatctcacacgaaacttgtgaatcctggttaatcaataaaccgtttaattcgtttcagttgaactttggctcttgtgcacttctttatctttatcttgtttccatggctactgcgtagataagcagcggcctgcggcgcttgcgcttcgcggtttacaactgctggttaatatttaactctcgccatacctctagtgatggagttggccactccctctatgcgcactcgctcgctcggtggggcctggcgaccaaaggtcgccagacggacgtgctttgcacgtccggccccaccgagcgagcgagtgcgcatagagggagtggccaa

SEQ ID NO: 58 - protein, 737 aa, Adeno-associated virus
MAADGYLPDWLEDNLSEGIREWWDLKPGAPKPKANQQKQDNGRGLVLPGYKYLGPFNGLDKGEPVNAADAAALEHDKAYDQQLNAGDNPYLRYNHADAEFQERLQEDTSFGGNLGRAVFQAKKRVLEPLGLVEEGAKTAPAKKRPVEPSPQRSPDSSTGIGKKGQQPARKRLNFGQTGDSESVPDPQPLGEPPAAPSSVGSGTVAAGGGAPMADNNEGADGVGNASGNWHCDSTWLGDRVITTSTRTWALPTYNNHLYEQISSETAGSTNDNTYFGYSTPWGYFDFNRFHCHFSPRDWQRLINNNWGFRPKKLRFKLFNIQVKEVTTNDGVTTIANNLTSTIQVFSDSEYQLPYVLGSAHQGCLPPFPADVFMIPQYGYLTLNNGSQSVGRSSFYCLEYFPSQMLRTGNNFEFSYSFEDVPFHSSYAHSQSLDRLMNPLIDQYLYYLARTQSDPGGTAGNRELQFYQGGPSTMAEQAKNWLPGPCFRQQRVSKTLDQNNNSNFAWTGATKYHLNGRNSLVNPGVAMATHKDDEDRFFPSSGVLIFGKTGATNKTTLENVLMTNEEEIRPTNPVATEEYGIVSSNLQAANTAAQTQVVNNQGALPGMVWQNRDVYLQGPIWAKIPHTDGNFHPSPLMGGFGLKHPPPQILIKNTPVPANPPEVFTPAKFASFITQYSTGQVSVEIEWELQKENSKRWDPEIQYTSNFEKQTGVDFAVDSQGVYSEPRPIGTRYLTRNL

SEQ ID NO: 59 - DNA, 2211 bp, Adeno-associated virus
atggctgctgacggttatcttccagattggctcgaggacaacctttctgaaggcattcgtgagtggtgggctctgaaacctggagtccctcaacccaaagcgaaccaacaacaccaggacaaccgtcggggtcttgtgcttccgggttacaaatacctcggacccggtaacggactcgacaaaggagagccggtcaacgaggcggacgcggcagccctcgaacacgacaaagcttacgaccagcagctcaaggccggtgacaacccgtacctcaagtacaaccacgccgacgccgagtttcaggagcgtcttcaagaagatacgtcttttgggggcaaccttggcagagcagtcttccaggccaaaaagaggatccttgagcctcttggtctggttgaggaagcagctaaaacggctcctggaaagaagggggctgtagatcagtctcctcaggaaccggactcatcatctggtgttggcaaatcgggcaaacagcctgccagaaaaagactaaatttcggtcagactggagactcagagtcagtcccagaccctcaacctctcggagaaccaccagcagcccccacaagtttgggatctaatacaatggcttcaggcggtggcgcaccaatggcagacaataacgagggtgccgatggagtgggtaattcctcaggaaattggcattgcgattcccaatggctgggcgacagagtcatcaccaccagcaccagaacctgggccctgcccacttacaacaaccatctctacaagcaaatctccagccaatcaggagcttcaaacgacaaccactactttggctacagcaccccttgggggtattttgactttaacagattccactgccacttctcaccacgtgactggcagcgactcattaacaacaactggggattccggcccaagaaactcagcttcaagctcttcaacatccaagttagaggggtcacgcagaacgatggcacgacgactattgccaataaccttaccagcacggttcaagtgtttacggactcggagtatcagctcccgtacgtgctcgggtcggcgcaccaaggctgtctcccgccgtttccagcggacgtcttcatggtccctcagtatggatacctcaccctgaacaacggaagtcaagcggtgggacgctcatccttttactgcctggagtacttcccttcgcagatgctaaggactggaaataacttccaattcagctataccttcgaggatgtaccttttcacagcagctacgctcacagccagagtttggatcgcttgatgaatcctcttattgatcagtatctgtactacctgaacagaacgcaaggaacaacctctggaacaaccaaccaatcacggctgctttttagccaggctgggcctcagtctatgtctttgcaggccagaaattggctacctgggccctgctaccggcaacagagactttcaaagactgctaacgacaacaacaacagtaactttccttggacagcggccagcaaatatcatctcaatggccgcgactcgctggtgaatccaggaccagctatggccagtcacaaggacgatgaagaaaaatttttccctatgcacggcaatctaatatttggcaaagaagggacaacggcaagtaacgcagaattagataatgtaatgattacggatgaagaagagattcgtaccaccaatcctgtggcaacagagcagtatggaactgtggcaaataacttgcagagctcaaatacagctcccacgactggaactgtcaatcatcagggggccttacctggcatggtgtggcaagatcgtgacgtgtaccttcaaggacctatctgggcaaagattcctcacacggatggacactttcatccttctcctctgatgggaggctttggactgaaacatccgcctcctcaaatcatgatcaaaaatactccggtaccggcaaatcctccgacgactttcagcccggccaagtttgcttcatttatcactcagtactccactggacaggtcagcgtggaaattgagtgggagctacagaaagaaaacagcaaacgttggaatccagagattcagtacacttccaactacaacaagtctgttaatgtggactttactgtagacactaatggtgtttatagtgaacctcgccctattggaacccggtatctcacacgaaacttgtaa

SEQ ID NO: 60 - protein, 736 aa, Adeno-associated virus; identical to SEQ ID NO: 56

SEQ ID NO: 61 - protein, 736 aa, Adeno-associated virus 3A; identical to SEQ ID NO: 56

SEQ ID NO: 62 - protein, 624 aa, Adeno-associated virus 3A
MPGFYEIVLKVPSDLDERLPGISNSFVNWVAEKEWDVPPDSDMDPNLIEQAPLTVAEKLQREFLVEWRRVSKAPEALFFVQFEKGETYFHLHVLIETIGVKSMVVGRYVSQIKEKLVTRIYRGVEPQLPNWFAVTKTRNGAGGGNKVVDDCYIPNYLLPKTQPELQWAWTNMDQYLSACLNLAERKRLVAQHLTHVSQTQEQNKENQNPNSDAPVIRSKTSARYMELVGWLVDRGITSEKQWIQEDQASYISFNAASNSRSQIKAALDNASKIMSLTKTAPDYLVGSNPPEDITKNRIYQILELNGYDPQYAASVFLGWAQKKFGKRNTIWLFGPATTGKTNIAEAIAHAVPFYGCVNWTNENFPFNDCVDKMVIWWEEGKMTAKVVESAKAILGGSKVRVDQKCKSSAQIEPTPVIVTSNTNMCAVIDGNSTTFEHQQPLQDRMFEFELTRRLDHDFGKVTKQEVKDFFRWASDHVTDVAHEFYVRKGGAKKRPASNDADVSEPKRECTSLAQPTTSDAEAPADYADRYQNKCSRHVGMNLMLFPCKTCERMNQISNVCFTHGQRDCGECFPGMSESQPVSVVKKKTYQKLCPIHHILGRAPEIACSACDLANVDLDDCVSEQ

SEQ ID NO: 63 - protein, 736 aa, Adeno-associated virus 3B
MAADGYLPDWLEDNLSEGIREWWALKPGVPQPKANQQHQDNRRGLVLPGYKYLGPGNGLDKGEPVNEADAAALEHDKAYDQQLKAGDNPYLKYNHADAEFQERLQEDTSFGGNLGRAVFQAKKRILEPLGLVEEAAKTAPGKKRPVDQSPQEPDSSSGVGKSGKQPARKRLNFGQTGDSESVPDPQPLGEPPAAPTSLGSNTMASGGGAPMADNNEGADGVGNSSGNWHCDSQWLGDRVITTSTRTWALPTYNNHLYKQISSQSGASNDNHYFGYSTPWGYFDFNRFHCHFSPRDWQRLINNNWGFRPKKLSFKLFNIQVKEVTQNDGTTTIANNLTSTVQVFTDSEYQLPYVLGSAHQGCLPPFPADVFMVPQYGYLTLNNGSQAVGRSSFYCLEYFPSQMLRTGNNFQFSYTFEDVPFHSSYAHSQSLDRLMNPLIDQYLYYLNRTQGTTSGTTNQSRLLFSQAGPQSMSLQARNWLPGPCYRQQRLSKTANDNNNSNFPWTAASKYHLNGRDSLVNPGPAMASHKDDEEKFFPMHGNLIFGKEGTTASNAELDNVMITDEEEIRTTNPVATEQYGTVANNLQSSNTAPTTRTVNDQGALPGMVWQDRDVYLQGPIWAKIPHTDGHFHPSPLMGGFGLKHPPPQIMIKNTPVPANPPTTFSPAKFASFITQYSTGQVSVEIEWELQKENSKRWNPEIQYTSNYNKSVNVDFTVDTNGVYSEPRPIGTRYLTRNL

SEQ ID NO: 64 - protein, 624 aa, Adeno-associated virus 3B
MPGFYEIVLKVPSDLDEHLPGISNSFVNWVAEKEWELPPDSDMDPNLIEQAPLTVAEKLQREFLVEWRRVSKAPEALFFVQFEKGETYFHLHVLIETIGVKSMVVGRYVSQIKEKLVTRIYRGVEPQLPNWFAVTKTRNGAGGGNKVVDDCYIPNYLLPKTQPELQWAWTNMDQYLSACLNLAERKRLVAQHLTHVSQTQEQNKENQNPNSDAPVIRSKTSARYMELVGWLVDRGITSEKQWIQEDQASYISFNAASNSRSQIKAALDNASKIMSLTKTAPDYLVGSNPPEDITKNRIYQILELNGYDPQYAASVFLGWAQKKFGKRNTIWLFGPATTGKTNIAEAIAHAVPFYGCVNWTNENFPFNDCVDKMVIWWEEGKMTAKVVESAKAILGGSKVRVDQKCKSSAQIEPTPVIVTSNTNMCAVIDGNSTTFEHQQPLQDRMFKFELTRRLDHDFGKVTKQEVKDFFRWASDHVTDVAHEFYVRKGGAKKRPASNDADVSEPKRQCTSLAQPTTSDAEAPADYADRYQNKCSRHVGMNLMLFPCKTCERMNQISNVCFTHGQRDCGECFPGMSESQPVSVVKKKTYQKLCPIHHILGRAPEIACSACDLANVDLDDCVSEQ

SEQ ID NO: 65 - DNA, 4722 bp, Adeno-associated virus 3B
tggccactccctctatgcgcactcgctcgctcggtggggcctggcgaccaaaggtcgccagacggacgtgctttgcacgtccggccccaccgagcgagcgagtgcgcatagagggagtggccaactccatcactagaggtatggcagtgacgtaacgcgaagcgcgcgaagcgagaccacgcctaccagctgcgtcagcagtcaggtgacccttttgcgacagtttgcgacaccacgtggccgctgagggtatatattctcgagtgagcgaaccaggagctccattttgaccgcgaaatttgaacgagcagcagccatgccggggttctacgagattgtcctgaaggtcccgagtgacctggacgagcacctgccgggcatttctaactcgtttgttaactgggtggccgagaaggaatgggagctgccgccggattctgacatggatccgaatctgattgagcaggcacccctgaccgtggccgaaaagcttcagcgcgagttcctggtggagtggcgccgcgtgagtaaggccccggaggccctcttttttgtccagttcgaaaagggggagacctacttccacctgcacgtgctgattgagaccatcggggtcaaatccatggtggtcggccgctacgtgagccagattaaagagaagctggtgacccgcatctaccgcggggtcgagccgcagcttccgaactggttcgcggtgaccaaaacgcgaaatggcgccgggggcgggaacaaggtggtggacgactgctacatccccaactacctgctccccaagacccagcccgagctccagtgggcgtggactaacatggaccagtatttaagcgcctgtttgaatctcgcggagcgtaaacggctggtggcgcagcatctgacgcacgtgtcgcagacgcaggagcagaacaaagagaatcagaaccccaattctgacgcgccggtcatcaggtcaaaaacctcagccaggtacatggagctggtcgggtggctggtggaccgcgggatcacgtcagaaaagcaatggattcaggaggaccaggcctcgtacatctccttcaacgccgcctccaactcgcggtcccagatcaaggccgcgctggacaatgcctccaagatcatgagcctgacaaagacggctccggactacctggtgggcagcaacccgccggaggacattaccaaaaatcggatctaccaaatcctggagctgaacgggtacgatccgcagtacgcggcctccgtcttcctgggctgggcgcaaaagaagttcgggaagaggaacaccatctggctctttgggccggccacgacgggtaaaaccaacatcgcggaagccatcgcccacgccgtgcccttctacggctgcgtaaactggaccaatgagaactttcccttcaacgattgcgtcgacaagatggtgatctggtgggaggagggcaagatgacggccaaggtcgtggagagcgccaaggccattctgggcggaagcaaggtgcgcgtggaccaaaagtgcaagtcatcggcccagatcgaacccactcccgtgatcgtcacctccaacaccaacatgtgcgccgtgattgacgggaacagcaccaccttcgagcatcagcagccgctgcaggaccggatgtttaaatttgaacttacccgccgtttggaccatgactttgggaaggtcaccaaacaggaagtaaaggactttttccggtgggcttccgatcacgtgactgacgtggctcatgagttctacgtcagaaagggtggagctaagaaacgccccgcctccaatgacgcggatgtaagcgagccaaaacggcagtgcacgtcacttgcgcagccgacaacgtcagacgcggaagcaccggcggactacgcggacaggtaccaaaacaaatgttctcgtcacgtgggcatgaatctgatgctttttccctgtaaaacatgcgagagaatgaatcaaatttccaatgtctgttttacgcatggtcaaagagactgtggggaatgcttccctggaatgtcagaatctcaacccgtttctgtcgtcaaaaagaagacttatcagaaactgtgtccaattcatcatatcctgggaagggcacccgagattgcctgttcggcctgcgatttggccaatgtggacttggatgactgtgtttctgagcaataaatgacttaaaccaggtatggctgctgacggttatcttccagattggctcgaggacaacctttctgaaggcattcgtgagtggtgggctctgaaacctggagtccctcaacccaaagcgaaccaacaacaccaggacaaccgtcggggtcttgtgcttccgggttacaaatacctcggacccggtaacggactcgacaaaggagagccggtcaacgaggcggacgcggcagccctcgaacacgacaaagcttacgaccagcagctcaaggccggtgacaacccgtacctcaagtacaaccacgccgacgccgagtttcaggagcgtcttcaagaagatacgtcttttgggggcaaccttggcagagcagtcttccaggccaaaaagaggatccttgagcctcttggtctggttgaggaagcagctaaaacggctcctggaaagaagaggcctgtagatcagtctcctcaggaaccggactcatcatctggtgttggcaaatcgggcaaacagcctgccagaaaaagactaaatttcggtcagactggcgactcagagtcagtcccagaccctcaacctctcggagaaccaccagcagcccccacaagtttgggatctaatacaatggcttcaggcggtggcgcaccaatggcagacaataacgagggtgccgatggagtgggtaattcctcaggaaattggcattgcgattcccaatggctgggcgacagagtcatcaccaccagcaccagaacctgggccctgcccacttacaacaaccatctctacaagcaaatctccagccaatcaggagcttcaaacgacaaccactactttggctacagcaccccttgggggtattttgactttaacagattccactgccacttctcaccacgtgactggcagcgactcattaacaacaactggggattccggcccaagaaactcagcttcaagctcttcaacatccaagttaaagaggtcacgcagaacgatggcacgacgactattgccaataaccttaccagcacggttcaagtgtttacggactcggagtatcagctcccgtacgtgctcgggtcggcgcaccaaggctgtctcccgccgtttccagcggacgtcttcatggtccctcagtatggatacctcaccctgaacaacggaagtcaagcggtgggacgctcatccttttactgcctggagtacttcccttcgcagatgctaaggactggaaataacttccaattcagctataccttcgaggatgtaccttttcacagcagctacgctcacagccagagtttggatcgcttgatgaatcctcttattgatcagtatctgtactacctgaacagaacgcaaggaacaacctctggaacaaccaaccaatcacggctgctttttagccaggctgggcctcagtctatgtctttgcaggccagaaattggctacctgggccctgctaccggcaacagagactttcaaagactgctaacgacaacaacaacagtaactttccttggacagcggccagcaaatatcatctcaatggccgcgactcgctggtgaatccaggaccagctatggccagtcacaaggacgatgaagaaaaatttttccctatgcacggcaatctaatatttggcaaagaagggacaacggcaagtaacgcagaattagataatgtaatgattacggatgaagaagagattcgtaccaccaatcctgtggcaacagagcagtatggaactgtggcaaataacttgcagagctcaaatacagctcccacgactagaactgtcaatgatcagggggccttacctggcatggtgtggcaagatcgtgacgtgtaccttcaaggacctatctgggcaaagattcctcacacggatggacactttcatccttctcctctgatgggaggctttggactgaaacatccgcctcctcaaatcatgatcaaaaatactccggtaccggcaaatcctccgacgactttcagcccggccaagtttgcttcatttatcactcagtactccactggacaggtcagcgtggaaattgagtgggagctacagaaagaaaacagcaaacgttggaatccagagattcagtacacttccaactacaacaagtctgttaatgtggactttactgtagacactaatggtgtttatagtgaacctcgccctattggaacccggtatctcacacgaaacttgtaatcctggttaatcaataaaccgtttaattcgtttcagttgaactttggctcttgtgcacttcttatcttatcttgtttccatggctactgcgtagataagcagcggcctgcggcgcttgcgcttcgcggtttacaactgctggttaatatttaactctcgccatacctctagtgatggagttggccactccctctatgcgcactcgctcgctcggtggggccggacgtgcaaagcacgtccgtctggcgacctttggtcgccaggccccaccgagcgagcgagtgcgcatagagggagtggccaa

SEQ ID NO: 66 - DNA, 1800 bp, Adeno-associated virus 4
  modified_base (342)..(342): n = a, c, t or g
  misc_feature (342)..(342): n is a, c, g, or t
acggctcctggaaagaagagaccgttgattgaatccccccagcagcccgactcctccacgggtatcggcaaaaaaggcaagcagccggctaaaaagaagctcgttttcgaagacgaaactggagcaggcgacggaccccctgagggatcaacttccggagccatgtctgatgacagtgagatgcgtgcagcagctggcggagctgcagtcgagggsggacaaggtgccgatggagtgggtaatgcctcgggtgattggcattgcgattccacctggtctgagggccacgtcacgaccaccagcaccagaacctgggtcttgcccacctacaacaaccacctntacaagcgactcggagagagcctgcagtccaacacctacaacggattctccaccccctggggatactttgacttcaaccgcttccactgccacttctcaccacgtgactggcagcgactcatcaacaacaactggggcatgcgacccaaagccatgcgggtcaaaatcttcaacatccaggtcaaggaggtcacgacgtcgaacggcgagacaacggtggctaataaccttaccagcacggttcagatctttgcggactcgtcgtacgaactgccgtacgtgatggatgcgggtcaagagggcagcctgcctccttttcccaacgacgtctttatggtgccccagtacggctactgtggactggtgaccggcaacacttcgcagcaacagactgacagaaatgccttctactgcctggagtactttccttcgcagatgctgcggactggcaacaactttgaaattacgtacagttttgagaaggtgcctttccactcgatgtacgcgcacagccagagcctggaccggctgatgaaccctctcatcgaccagtacctgtggggactgcaatcgaccaccaccggaaccaccctgaatgccgggactgccaccaccaactttaccaagctgcggcctaccaacttttccaactttaaaaagaactggctgcccgggccttcaatcaagcagcagggcttctcaaagactgccaatcaaaactacaagatccctgccaccgggtcagacagtctcatcaaatacgagacgcacagcactctggacggaagatggagtgccctgacccccggacctccaatggccacggctggacctgcggacagcaagttcagcaacagccagctcatctttgcggggcctaaacagaacggcaacacggccaccgtacccgggactctgatcttcacctctgaggaggagctggcagccaccaacgccaccgatacggacatgtggggcaacctacctggcggtgaccagagcaacagcaacctgccgaccgtggacagactgacagccttgggagccgtgcctggaatggtctggcaaaacagagacatttactaccagggtcccatttgggccaagattcctcataccgatggacactttcacccctcaccgctgattggtgggtttgggctgaaacacccgcctcctcaaatttttatcaagaacaccccggtacctgcgaatcctgcaacgaccttcagctctactccggtaaactccttcattactcagtacagcactggccaggtgtcggtgcagattgactgggagatccagaaggagcggtccaaacgctggaaccccgaggtccagtttacctccaactacggacagcaaaactctctgttgtgggctcccgatgcggctgggaaatacactgagcctagggctatcggtacccgctacctcacccaccacctgtaataa

SEQ ID NO: 67 - DNA, 2208 bp, Adeno-associated virus 4
  modified_base (750)..(750): n is a, c, t or g
  misc_feature (750)..(750): n is a, c, g, or t
atgactgacggttaccttccagattggctagaggacaacctctctgaaggcgttcgagagtggtgggcgctgcaacctggagcccctaaacccaaggcaaatcaacaacatcaggacaacgctcggggtcttgtgcttccgggttacaaatacctcggacccggcaacggactcgacaagggggaacccgtcaacgcagcggacgcggcagccctcgagcacgacaaggcctacgaccagcagctcaaggccggtgacaacccctacctcaagtacaaccacgccgacgcggagttccagcagcggcttcagggcgacacatcgtttgggggcaacctcggcagagcagtcttccaggccaaaaagagggttcttgaacctcttggtctggttgagcaagcgggtgagacggctcctggaaagaagagaccgttgattgaatccccccagcagcccgactcctccacgggtatcggcaaaaaaggcaagcagccggctaaaaagaagctcgttttcgaagacgaaactggagcaggcgacggaccccctgagggatcaacttccggagccatgtctgatgacagtgagatgcgtgcagcagctggcggagctgcagtcgagggsggacaaggtgccgatggagtgggtaatgcctcgggtgattggcattgcgattccacctggtctgagggccacgtcacgaccaccagcaccagaacctgggtcttgcccacctacaacaaccacctntacaagcgactcggagagagcctgcagtccaacacctacaacggattctccaccccctggggatactttgacttcaaccgcttccactgccacttctcaccacgtgactggcagcgactcatcaacaacaactggggcatgcgacccaaagccatgcgggtcaaaatcttcaacatccaggtcaaggaggtcacgacgtcgaacggcgagacaacggtggctaataaccttaccagcacggttcagatctttgcggactcgtcgtacgaactgccgtacgtgatggatgcgggtcaagagggcagcctgcctccttttcccaacgacgtctttatggtgccccagtacggctactgtggactggtgaccggcaacacttcgcagcaacagactgacagaaatgccttctactgcctggagtactttccttcgcagatgctgcggactggcaacaactttgaaattacgtacagttttgagaaggtgcctttccactcgatgtacgcgcacagccagagcctggaccggctgatgaaccctctcatcgaccagtacctgtggggactgcaatcgaccaccaccggaaccaccctgaatgccgggactgccaccaccaactttaccaagctgcggcctaccaacttttccaactttaaaaagaactggctgcccgggccttcaatcaagcagcagggcttctcaaagactgccaatcaaaactacaagatccctgccaccgggtcagacagtctcatcaaatacgagacgcacagcactctggacggaagatggagtgccctgacccccggacctccaatggccacggctggacctgcggacagcaagttcagcaacagccagctcatctttgcggggcctaaacagaacggcaacacggccaccgtacccgggactctgatcttcacctctgaggaggagctggcagccaccaacgccaccgatacggacatgtggggcaacctacctggcggtgaccagagcaacagcaacctgccgaccgtggacagactgacagccttgggagccgtgcctggaatggtctggcaaaacagagacatttactaccagggtcccatttgggccaagattcctcataccgatggacactttcacccctcaccgctgattggtgggtttgggctgaaacacccgcctcctcaaatttttatcaagaacaccccggtacctgcgaatcctgcaacgaccttcagctctactccggtaaactccttcattactcagtacagcactggccaggtgtcggtgcagattgactgggagatccagaaggagcggtccaaacgctggaaccccgaggtccagtttacctccaactacggacagcaaaactctctgttgtgggctcccgatgcggctgggaaatacactgagcctagggctatcggtacccgctacctcacccaccacctgtaataa

SEQ ID NO: 68 - DNA, 1872 bp, Adeno-associated virus 4
atgccggggttctacgagatcgtgctgaaggtgcccagcgacctggacgagcacctgcccggcatttctgactcttttgtgagctgggtggccgagaaggaatgggagctgccgccggattctgacatggacttgaatctgattgagcaggcacccctgaccgtggccgaaaagctgcaacgcgagttcctggtcgagtggcgccgcgtgagtaaggccccggaggccctcttctttgtccagttcgagaagggggacagctacttccacctgcacatcctggtggagaccgtgggcgtcaaatccatggtggtgggccgctacgtgagccagattaaagagaagctggtgacccgcatctaccgcggggtcgagccgcagcttccgaactggttcgcggtgaccaagacgcgtaatggcgccggaggcgggaacaaggtggtggacgactgctacatccccaactacctgctccccaagacccagcccgagctccagtgggcgtggactaacatggaccagtatataagcgcctgtttgaatctcgcggagcgtaaacggctggtggcgcagcatctgacgcacgtgtcgcagacgcaggagcagaacaaggaaaaccagaaccccaattctgacgcgccggtcatcaggtcaaaaacctccgccaggtacatggagctggtcgggtggctggtggaccgcgggatcacgtcagaaaagcaatggatccaggaggaccaggcgtcctacatctccttcaacgccgcctccaactcgcggtcacaaatcaaggccgcgctggacaatgcctccaaaatcatgagcctgacaaagacggctccggactacctggtgggccagaacccgccggaggacatttccagcaaccgcatctaccgaatcctcgagatgaacgggtacgatccgcagtacgcggcctccgtcttcctgggctgggcgcaaaagaagttcgggaagaggaacaccatctggctctttgggccggccacgacgggtaaaaccaacatcgcggaagccatcgcccacgccgtgcccttctacggctgcgtgaactggaccaatgagaactttccgttcaacgattgcgtcgacaagatggtgatctggtgggaggagggcaagatgacggccaaggtcgtagagagcgccaaggccatcctgggcggaagcaaggtgcgcgtggaccaaaagtgcaagtcatcggcccagatcgacccaactcccgtgatcgtcacctccaacaccaacatgtgcgcggtcatcgacggaaactcgaccaccttcgagcaccaacaaccactccaggaccggatgttcaagttcgagctcaccaagcgcctggagcacgactttggcaaggtcaccaagcaggaagtcaaagactttttccggtgggcgtcagatcacgtgaccgaggtgactcacgagttttacgtcagaaagggtggagctagaaagaggcccgcccccaatgacgcagatataagtgagcccaagcgggcctgtccgtcagttgcgcagccatcgacgtcagacgcggaagctccggtggactacgcggacaggtaccaaaacaaatgttctcgtcacgtgggtatgaatctgatgctttttccctgccggcaatgcgagagaatgaatcagaatgtggacatttgcttcacgcacggggtcatggactgtgccgagtgcttccccgtgtcagaatctcaacccgtgtctgtcgtcagaaagcggacgtatcagaaactgtgtccgattcatcacatcatggggagggcgcccgaggtggcctgctcggcctgcgaactggccaatgtggacttggatgactgtgacatggaacaataa

SEQ ID NO: 69 - DNA, 1611 bp, Adeno-associated virus 4
atgccggggttctacgagatcgtgctgaaggtgcccagcgacctggacgagcacctgcccggcatttctgactcttttgtgagctgggtggccgagaaggaatgggagctgccgccggattctgacatggacttgaatctgattgagcaggcacccctgaccgtggccgaaaagctgcaacgcgagttcctggtcgagtggcgccgcgtgagtaaggccccggaggccctcttctttgtccagttcgagaagggggacagctacttccacctgcacatcctggtggagaccgtgggcgtcaaatccatggtggtgggccgctacgtgagccagattaaagagaagctggtgacccgcatctaccgcggggtcgagccgcagcttccgaactggttcgcggtgaccaagacgcgtaatggcgccggaggcgggaacaaggtggtggacgactgctacatccccaactacctgctccccaagacccagcccgagctccagtgggcgtggactaacatggaccagtatataagcgcctgtttgaatctcgcggagcgtaaacggctggtggcgcagcatctgacgcacgtgtcgcagacgcaggagcagaacaaggaaaaccagaaccccaattctgacgcgccggtcatcaggtcaaaaacctccgccaggtacatggagctggtcgggtggctggtggaccgcgggatcacgtcagaaaagcaatggatccaggaggaccaggcgtcctacatctccttcaacgccgcctccaactcgcggtcacaaatcaaggccgcgctggacaatgcctccaaaatcatgagcctgacaaagacggctccggactacctggtgggccagaacccgccggaggacatttccagcaaccgcatctaccgaatcctcgagatgaacgggtacgatccgcagtacgcggcctccgtcttcctgggctgggcgcaaaagaagttcgggaagaggaacaccatctggctctttgggccggccacgacgggtaaaaccaacatcgcggaagccatcgcccacgccgtgcccttctacggctgcgtgaactggaccaatgagaactttccgttcaacgattgcgtcgacaagatggtgatctggtgggaggagggcaagatgacggccaaggtcgtagagagcgccaaggccatcctgggcggaagcaaggtgcgcgtggaccaaaagtgcaagtcatcggcccagatcgacccaactcccgtgatcgtcacctccaacaccaacatgtgcgcggtcatcgacggaaactcgaccaccttcgagcaccaacaaccactccaggaccggatgttcaagttcgagctcaccaagcgcctggagcacgactttggcaaggtcaccaagcaggaagtcaaagactttttccggtgggcgtcagatcacgtgaccgaggtgactcacgagttttacgtcagaaagggtggagctagaaagaggcccgcccccaatgacgcagatataagtgagcccaagcgggcctgtccgtcagttgcgcagccatcgacgtcagacgcggaagctccggtggactacgcggacagattggctagaggacaacctctctga

SEQ ID NO: 70 - DNA, 1872 bp, Adeno-associated virus 4; identical to SEQ ID NO: 68

SEQ ID NO: 71 - DNA, 1617 bp, Adeno-associated virus 4
  modified_base (162)..(162): n is a, c, t or g
  misc_feature (162)..(162): n is a, c, g, or t
atgcgtgcagcagctggcggagctgcagtcgagggsggacaaggtgccgatggagtgggtaatgcctcgggtgattggcattgcgattccacctggtctgagggccacgtcacgaccaccagcaccagaacctgggtcttgcccacctacaacaaccacctntacaagcgactcggagagagcctgcagtccaacacctacaacggattctccaccccctggggatactttgacttcaaccgcttccactgccacttctcaccacgtgactggcagcgactcatcaacaacaactggggcatgcgacccaaagccatgcgggtcaaaatcttcaacatccaggtcaaggaggtcacgacgtcgaacggcgagacaacggtggctaataaccttaccagcacggttcagatctttgcggactcgtcgtacgaactgccgtacgtgatggatgcgggtcaagagggcagcctgcctccttttcccaacgacgtctttatggtgccccagtacggctactgtggactggtgaccggcaacacttcgcagcaacagactgacagaaatgccttctactgcctggagtactttccttcgcagatgctgcggactggcaacaactttgaaattacgtacagttttgagaaggtgcctttccactcgatgtacgcgcacagccagagcctggaccggctgatgaaccctctcatcgaccagtacctgtggggactgcaatcgaccaccaccggaaccaccctgaatgccgggactgccaccaccaactttaccaagctgcggcctaccaacttttccaactttaaaaagaactggctgcccgggccttcaatcaagcagcagggcttctcaaagactgccaatcaaaactacaagatccctgccaccgggtcagacagtctcatcaaatacgagacgcacagcactctggacggaagatggagtgccctgacccccggacctccaatggccacggctggacctgcggacagcaagttcagcaacagccagctcatctttgcggggcctaaacagaacggcaacacggccaccgtacccgggactctgatcttcacctctgaggaggagctggcagccaccaacgccaccgatacggacatgtggggcaacctacctggcggtgaccagagcaacagcaacctgccgaccgtggacagactgacagccttgggagccgtgcctggaatggtctggcaaaacagagacatttactaccagggtcccatttgggccaagattcctcataccgatggacactttcacccctcaccgctgattggtgggtttgggctgaaacacccgcctcctcaaatttttatcaagaacaccccggtacctgcgaatcctgcaacgaccttcagctctactccggtaaactccttcattactcagtacagcactggccaggtgtcggtgcagattgactgggagatccagaaggagcggtccaaacgctggaaccccgaggtccagtttacctccaactacggacagcaaaactctctgttgtgggctcccgatgcggctgggaaatacactgagcctagggctatcggtacccgctacctcacccaccacctgtaa

SEQ ID NO: 72 - DNA, 939 bp, Adeno-associated virus 4
atggagctggtcgggtggctggtggaccgcgggatcacgtcagaaaagcaatggatccaggaggaccaggcgtcctacatctccttcaacgccgcctccaactcgcggtcacaaatcaaggccgcgctggacaatgcctccaaaatcatgagcctgacaaagacggctccggactacctggtgggccagaacccgccggaggacatttccagcaaccgcatctaccgaatcctcgagatgaacgggtacgatccgcagtacgcggcctccgtcttcctgggctgggcgcaaaagaagttcgggaagaggaacaccatctggctctttgggccggccacgacgggtaaaaccaacatcgcggaagccatcgcccacgccgtgcccttctacggctgcgtgaactggaccaatgagaactttccgttcaacgattgcgtcgacaagatggtgatctggtgggaggagggcaagatgacggccaaggtcgtagagagcgccaaggccatcctgggcggaagcaaggtgcgcgtggaccaaaagtgcaagtcatcggcccagatcgacccaactcccgtgatcgtcacctccaacaccaacatgtgcgcggtcatcgacggaaactcgaccaccttcgagcaccaacaaccactccaggaccggatgttcaagttcgagctcaccaagcgcctggagcacgactttggcaaggtcaccaagcaggaagtcaaagactttttccggtgggcgtcagatcacgtgaccgaggtgactcacgagttttacgtcagaaagggtggagctagaaagaggcccgcccccaatgacgcagatataagtgagcccaagcgggcctgtccgtcagttgcgcagccatcgacgtcagacgcggaagctccggtggactacgcggacagattggctagaggacaacctctctga

SEQ ID NO: 73 - DNA, 1197 bp, Adeno-associated virus 4
atggagctggtcgggtggctggtggaccgcgggatcacgtcagaaaagcaatggatccaggaggaccaggcgtcctacatctccttcaacgccgcctccaactcgcggtcacaaatcaaggccgcgctggacaatgcctccaaaatcatgagcctgacaaagacggctccggactacctggtgggccagaacccgccggaggacatttccagcaaccgcatctaccgaatcctcgagatgaacgggtacgatccgcagtacgcggcctccgtcttcctgggctgggcgcaaaagaagttcgggaagaggaacaccatctggctctttgggccggccacgacgggtaaaaccaacatcgcggaagccatcgcccacgccgtgcccttctacggctgcgtgaactggaccaatgagaactttccgttcaacgattgcgtcgacaagatggtgatctggtgggaggagggcaagatgacggccaaggtcgtagagagcgccaaggccatcctgggcggaagcaaggtgcgcgtggaccaaaagtgcaagtcatcggcccagatcgacccaactcccgtgatcgtcacctccaacaccaacatgtgcgcggtcatcgacggaaactcgaccaccttcgagcaccaacaaccactccaggaccggatgttcaagttcgagctcaccaagcgcctggagcacgactttggcaaggtcaccaagcaggaagtcaaagactttttccggtgggcgtcagatcacgtgaccgaggtgactcacgagttttacgtcagaaagggtggagctagaaagaggcccgcccccaatgacgcagatataagtgagcccaagcgggcctgtccgtcagttgcgcagccatcgacgtcagacgcggaagctccggtggactacgcggacaggtaccaaaacaaatgttctcgtcacgtgggtatgaatctgatgctttttccctgccggcaatgcgagagaatgaatcagaatgtggacatttgcttcacgcacggggtcatggactgtgccgagtgcttccccgtgtcagaatctcaacccgtgtctgtcgtcagaaagcggacgtatcagaaactgtgtccgattcatcacatcatggggagggcgcccgaggtggcctgctcggcctgcgaactggccaatgtggacttggatgactgtgacatggaacaa

SEQ ID NO: 74 - DNA, 245 bp, Adeno-associated virus 4
ctccatcatctaggtttgcccactgacgtcaatgtgacgtcctagggttagggaggtccctgtattagcagtcacgtgagtgtcgtatttcgcggagcgtagcggagcgcataccaagctgccacgtcacagccacgtggtccgtttgcgacagtttgcgacaccatgtggtcaggagggtatataaccgcgagtgagccagcgaggagctccattttgcccgcgaattttgaacgagcagcagc

SEQ ID NO: 75 - protein, 313 aa, Adeno-associated virus 4
  MOD_RES (313)..(313): Xaa = any amino acid
MELVGWLVDRGITSEKQWIQEDQASYISFNAASNSRSQIKAALDNASKIMSLTKTAPDYLVGQNPPEDISSNRIYRILEMNGYDPQYAASVFLGWAQKKFGKRNTIWLFGPATTGKTNIAEAIAHAVPFYGCVNWTNENFPFNDCVDKMVIWWEEGKMTAKVVESAKAILGGSKVRVDQKCKSSAQIDPTPVIVTSNTNMCAVIDGNSTTFEHQQPLQDRMFKFELTKRLEHDFGKVTKQEVKDFFRWASDHVTEVTHEFYVRKGGARKRPAPNDADISEPKRACPSVAQPSTSDAEAPVDYADRLARGQPLX

SEQ ID NO: 76 - protein, 399 aa, Adeno-associated virus 4
MELVGWLVDRGITSEKQWIQEDQASYISFNAASNSRSQIKAALDNASKIMSLTKTAPDYLVGQNPPEDISSNRIYRILEMNGYDPQYAASVFLGWAQKKFGKRNTIWLFGPATTGKTNIAEAIAHAVPFYGCVNWTNENFPFNDCVDKMVIWWEEGKMTAKVVESAKAILGGSKVRVDQKCKSSAQIDPTPVIVTSNTNMCAVIDGNSTTFEHQQPLQDRMFKFELTKRLEHDFGKVTKQEVKDFFRWASDHVTEVTHEFYVRKGGARKRPAPNDADISEPKRACPSVAQPSTSDAEAPVDYADRYQNKCSRHVGMNLMLFPCRQCERMNQNVDICFTHGVMDCAECFPVSESQPVSVVRKRTYQKLCPIHHIMGRAPEVACSACELANVDLDDCDMEQ

SEQ ID NO: 77 - protein, 623 aa, Adeno-associated virus 4
MPGFYEIVLKVPSDLDEHLPGISDSFVSWVAEKEWELPPDSDMDLNLIEQAPLTVAEKLQREFLVEWRRVSKAPEALFFVQFEKGDSYFHLHILVETVGVKSMVVGRYVSQIKEKLVTRIYRGVEPQLPNWFAVTKTRNGAGGGNKVVDDCYIPNYLLPKTQPELQWAWTNMDQYISACLNLAERKRLVAQHLTHVSQTQEQNKENQNPNSDAPVIRSKTSARYMELVGWLVDRGITSEKQWIQEDQASYISFNAASNSRSQIKAALDNASKIMSLTKTAPDYLVGQNPPEDISSNRIYRILEMNGYDPQYAASVFLGWAQKKFGKRNTIWLFGPATTGKTNIAEAIAHAVPFYGCVNWTNENFPFNDCVDKMVIWWEEGKMTAKVVESAKAILGGSKVRVDQKCKSSAQIDPTPVIVTSNTNMCAVIDGNSTTFEHQQPLQDRMFKFELTKRLEHDFGKVTKQEVKDFFRWASDHVTEVTHEFYVRKGGARKRPAPNDADISEPKRACPSVAQPSTSDAEAPVDYADRYQNKCSRHVGMNLMLFPCRQCERMNQNVDICFTHGVMDCAECFPVSESQPVSVVRKRTYQKLCPIHHIMGRAPEVACSACELANVDLDDCDMEQ

SEQ ID NO: 78 - protein, 537 aa, Adeno-associated virus 4
  MOD_RES (537)..(537): Xaa = any amino acid
MPGFYEIVLKVPSDLDEHLPGISDSFVSWVAEKEWELPPDSDMDLNLIEQAPLTVAEKLQREFLVEWRRVSKAPEALFFVQFEKGDSYFHLHILVETVGVKSMVVGRYVSQIKEKLVTRIYRGVEPQLPNWFAVTKTRNGAGGGNKVVDDCYIPNYLLPKTQPELQWAWTNMDQYISACLNLAERKRLVAQHLTHVSQTQEQNKENQNPNSDAPVIRSKTSARYMELVGWLVDRGITSEKQWIQEDQASYISFNAASNSRSQIKAALDNASKIMSLTKTAPDYLVGQNPPEDISSNRIYRILEMNGYDPQYAASVFLGWAQKKFGKRNTIWLFGPATTGKTNIAEAIAHAVPFYGCVNWTNENFPFNDCVDKMVIWWEEGKMTAKVVESAKAILGGSKVRVDQKCKSSAQIDPTPVIVTSNTNMCAVIDGNSTTFEHQQPLQDRMFKFELTKRLEHDFGKVTKQEVKDFFRWASDHVTEVTHEFYVRKGGARKRPAPNDADISEPKRACPSVAQPSTSDAEAPVDYADRLARGQPLX

SEQ ID NO: 79 - protein, 623 aa, Adeno-associated virus 4; identical to SEQ ID NO: 77

SEQ ID NO: 80 - protein, 544 aa, Adeno-associated virus 4
MSDDSEMRAAAGGAAVEGGQGADGVGNASGDWHCDSTWSEGHVTTTSTRTWVLPTYNNHLYKRLGESLQSNTYNGFSTPWGYFDFNRFHCHFSPRDWQRLINNNWGMRPKAMRVKIFNIQVKEVTTSNGETTVANNLTSTVQIFADSSYELPYVMDAGQEGSLPPFPNDVFMVPQYGYCGLVTGNTSQQQTDRNAFYCLEYFPSQMLRTGNNFEITYSFEKVPFHSMYAHSQSLDRLMNPLIDQYLWGLQSTTTGTTLNAGTATTNFTKLRPTNFSNFKKNWLPGPSIKQQGFSKTANQNYKIPATGSDSLIKYETHSTLDGRWSALTPGPPMATAGPADSKFSNSQLIFAGPKQNGNTATVPGTLIFTSEEELAATNATDTDMWGNLPGGDQSNSNLPTVDRLTALGAVPGMVWQNRDIYYQGPIWAKIPHTDGHFHPSPLIGGFGLKHPPPQIFIKNTPVPANPATTFSSTPVNSFITQYSTGQVSVQIDWEIQKERSKRWNPEVQFTSNYGQQNSLLWAPDAAGKYTEPRAIGTRYLTHHL

SEQ ID NO: 81 - protein, 734 aa, Adeno-associated virus 4
MTDGYLPDWLEDNLSEGVREWWALQPGAPKPKANQQHQDNARGLVLPGYKYLGPGNGLDKGEPVNAADAAALEHDKAYDQQLKAGDNPYLKYNHADAEFQQRLQGDTSFGGNLGRAVFQAKKRVLEPLGLVEQAGETAPGKKRPLIESPQQPDSSTGIGKKGKQPAKKKLVFEDETGAGDGPPEGSTSGAMSDDSEMRAAAGGAAVEGGQGADGVGNASGDWHCDSTWSEGHVTTTSTRTWVLPTYNNHLYKRLGESLQSNTYNGFSTPWGYFDFNRFHCHFSPRDWQRLINNNWGMRPKAMRVKIFNIQVKEVTTSNGETTVANNLTSTVQIFADSSYELPYVMDAGQEGSLPPFPNDVFMVPQYGYCGLVTGNTSQQQTDRNAFYCLEYFPSQMLRTGNNFEITYSFEKVPFHSMYAHSQSLDRLMNPLIDQYLWGLQSTTTGTTLNAGTATTNFTKLRPTNFSNFKKNWLPGPSIKQQGFSKTANQNYKIPATGSDSLIKYETHSTLDGRWSALTPGPPMATAGPADSKFSNSQLIFAGPKQNGNTATVPGTLIFTSEEELAATNATDTDMWGNLPGGDQSNSNLPTVDRLTALGAVPGMVWQNRDIYYQGPIWAKIPHTDGHFHPSPLIGGFGLKHPPPQIFIKNTPVPANPATTFSSTPVNSFITQYSTGQVSVQIDWEIQKERSKRWNPEVQFTSNYGQQNSLLWAPDAAGKYTEPRAIGTRYLTHHL

SEQ ID NO: 82 - protein, 598 aa, Adeno-associated virus 4
TAPGKKRPLIESPQQPDSSTGIGKKGKQPAKKKLVFEDETGAGDGPPEGSTSGAMSDDSEMRAAAGGAAVEGGQGADGVGNASGDWHCDSTWSEGHVTTTSTRTWVLPTYNNHLYKRLGESLQSNTYNGFSTPWGYFDFNRFHCHFSPRDWQRLINNNWGMRPKAMRVKIFNIQVKEVTTSNGETTVANNLTSTVQIFADSSYELPYVMDAGQEGSLPPFPNDVFMVPQYGYCGLVTGNTSQQQTDRNAFYCLEYFPSQMLRTGNNFEITYSFEKVPFHSMYAHSQSLDRLMNPLIDQYLWGLQSTTTGTTLNAGTATTNFTKLRPTNFSNFKKNWLPGPSIKQQGFSKTANQNYKIPATGSDSLIKYETHSTLDGRWSALTPGPPMATAGPADSKFSNSQLIFAGPKQNGNTATVPGTLIFTSEEELAATNATDTDMWGNLPGGDQSNSNLPTVDRLTALGAVPGMVWQNRDIYYQGPIWAKIPHTDGHFHPSPLIGGFGLKHPPPQIFIKNTPVPANPATTFSSTPVNSFITQYSTGQVSVQIDWEIQKERSKRWNPEVQFTSNYGQQNSLLWAPDAAGKYTEPRAIGTRYLTHHL

SEQ ID NO: 83 - DNA, 129 bp, Adeno-associated virus 4
ttggccactccctctatgcgcgctcgctcactcactcggccctgcggccagaggccggcagtctggagacctttggtgtccagggcagggccgagtgagtgagcgagcgcgcatagagggagtggccaa

SEQ ID NO: 84 - DNA, 125 bp, Adeno-associated virus 4
ttggccactccctctatgcgcgctcgctcactcactcggccctggagaccaaaggtctccagactgccggcctctggccggcagggccgagtgagtgagcgagcgcgcatagagggagtggccaa

SEQ ID NO: 85 - DNA, 4768 bp, Adeno-associated virus 4
  modified_base (3009)..(3009): n is a, c, t or g
  misc_feature (3009)..(3009): n is a, c, g, or t
ttggccactccctctatgcgcgctcgctcactcactcggccctggagaccaaaggtctccagactgccggcctctggccggcagggccgagtgagtgagcgagcgcgcatagagggagtggccaactccatcatctaggtttgcccactgacgtcaatgtgacgtcctagggttagggaggtccctgtattagcagtcacgtgagtgtcgtatttcgcggagcgtagcggagcgcataccaagctgccacgtcacagccacgtggtccgtttgcgacagtttgcgacaccatgtggtcaggagggtatataaccgcgagtgagccagcgaggagctccattttgcccgcgaattttgaacgagcagcagccatgccggggttctacgagatcgtgctgaaggtgcccagcgacctggacgagcacctgcccggcatttctgactcttttgtgagctgggtggccgagaaggaatgggagctgccgccggattctgacatggacttgaatctgattgagcaggcacccctgaccgtggccgaaaagctgcaacgcgagttcctggtcgagtggcgccgcgtgagtaaggccccggaggccctcttctttgtccagttcgagaagggggacagctacttccacctgcacatcctggtggagaccgtgggcgtcaaatccatggtggtgggccgctacgtgagccagattaaagagaagctggtgacccgcatctaccgcggggtcgagccgcagcttccgaactggttcgcggtgaccaagacgcgtaatggcgccggaggcgggaacaaggtggtggacgactgctacatccccaactacctgctccccaagacccagcccgagctccagtgggcgtggactaacatggaccagtatataagcgcctgtttgaatctcgcggagcgtaaacggctggtggcgcagcatctgacgcacgtgtcgcagacgcaggagcagaacaaggaaaaccagaaccccaattctgacgcgccggtcatcaggtcaaaaacctccgccaggtacatggagctggtcgggtggctggtggaccgcgggatcacgtcagaaaagcaatggatccaggaggaccaggcgtcctacatctccttcaacgccgcctccaactcgcggtcacaaatcaaggccgcgctggacaatgcctccaaaatcatgagcctgacaaagacggctccggactacctggtgggccagaacccgccggaggacatttccagcaaccgcatctaccgaatcctcgagatgaacgggtacgatccgcagtacgcggcctccgtcttcctgggctgggcgcaaaagaagttcgggaagaggaacaccatctggctctttgggccggccacgacgggtaaaaccaacatcgcggaagccatcgcccacgccgtgcccttctacggctgcgtgaactggaccaatgagaactttccgttcaacgattgcgtcgacaagatggtgatctggtgggaggagggcaagatgacggccaaggtcgtagagagcgccaaggccatcctgggcggaagcaaggtgcgcgtggaccaaaagtgcaagtcatcggcccagatcgacccaactcccgtgatcgtcacctccaacaccaacatgtgcgcggtcatcgacggaaactcgaccaccttcgagcaccaacaaccactccaggaccggatgttcaagttcgagctcaccaagcgcctggagcacgactttggcaaggtcaccaagcaggaagtcaaagactttttccggtgggcgtcagatcacgtgaccgaggtgactcacgagttttacgtcagaaagggtggagctagaaagaggcccgcccccaatgacgcagatataagtgagcccaagcgggcctgtccgtcagttgcgcagccatcgacgtcagacgcggaagctccggtggactacgcggacaggtaccaaaacaaatgttctcgtcacgtgggtatgaatctgatgctttttccctgccggcaatgcgagagaatgaatcagaatgtggacatttgcttcacgcacggggtcatggactgtgccgagtgcttccccgtgtcagaatctcaacccgtgtctgtcgtcagaaagcggacgtatcagaaactgtgtccgattcatcacatcatggggagggcgcccgaggtggcctgctcggcctgcgaactggccaatgtggacttggatgactgtgacatggaacaataaatgactcaaaccagatatgactgacggttaccttccagattggctagaggacaacctctctgaaggcgttcgagagtggtgggcgctgcaacctggagcccctaaacccaaggcaaatcaacaacatcaggacaacgctcggggtcttgtgcttccgggttacaaatacctcggacccggcaacggactcgacaagggggaacccgtcaacgcagcggacgcggcagccctcgagcacgacaaggcctacgaccagcagctcaaggccggtgacaacccctacctcaagtacaaccacgccgacgcggagttccagcagcggcttcagggcgacacaccgtttgggggcaacctcggcagagcagtcttccaggccaaaaagagggttcttgaacctcttggtctggttgagcaagcgggtgagacggctcctggaaagaagagaccgttgattgaatccccccagcagcccgactcctccacgggtatcggcaaaaaaggcaagcagccggctaaaaagaagctcgttttcgaagacgaaactggagcaggcgacggaccccctgagggatcaacttccggagccatgtctgatgacagtgagatgcgtgcagcagctggcggagctgcagtcgagggsggacaaggtgccgatggagtgggtaatgcctcgggtgattggcattgcgattccacctggtctgagggccacgtcacgaccaccagcaccagaacctgggtcttgcccacctacaacaaccacctntacaagcgactcggagagagcctgcagtccaacacctacaacggattctccaccccctggggatactttgacttcaaccgcttccactgccacttctcaccacgtgactggcagcgactcatcaacaacaactggggcatgcgacccaaagccatgcgggtcaaaatcttcaacatccaggtcaaggaggtcacgacgtcgaacggcgagacaacggtggctaataaccttaccagcacggttcagatctttgcggactcgtcgtacgaactgccgtacgtgatggatgcgggtcaagagggcagcctgcctccttttcccaacgacgtctttatggtgccccagtacggctactgtggactggtgaccggcaacacttcgcagcaacagactgacagaaatgccttctactgcctggagtactttccttcgcagatgctgcggactggcaacaactttgaaattacgtacagttttgagaaggtgcctttccactcgatgtacgcgcacagccagagcctggaccggctgatgaaccctctcatcgaccagtacctgtggggactgcaatcgaccaccaccggaaccaccctgaatgccgggactgccaccaccaactttaccaagctgcggcctaccaacttttccaactttaaaaagaactggctgcccgggccttcaatcaagcagcagggcttctcaaagactgccaatcaaaactacaagatccctgccaccgggtcagacagtctcatcaaatacgagacgcacagcactctggacggaagatggagtgccctgacccccggacctccaatggccacggctggacctgcggacagcaagttcagcaacagccagctcatctttgcggggcctaaacagaacggcaacacggccaccgtacccgggactctgatcttcacctctgaggaggagctggcagccaccaacgccaccgatacggacatgtggggcaacctacctggcggtgaccagagcaacagcaacctgccgaccgtggacagactgacagccttgggagccgtgcctggaatggtctggcaaaacagagacatttactaccagggtcccatttgggccaagattcctcataccgatggacactttcacccctcaccgctgattggtgggtttgggctgaaacacccgcctcctcaaatttttatcaagaacaccccggtacctgcgaatcctgcaacgaccttcagctctactccggtaaactccttcattactcagtacagcactggccaggtgtcggtgcagattgactgggagatccagaaggagcggtccaaacgctggaaccccgaggtccagtttacctccaactacggacagcaaaactctctgttgtgggctcccgatgcggctgggaaatacactgagcctagggctatcggtacccgctacctcacccaccacctgtaataacctgttaatcaataaaccggtttattcgtttcagttgaactttggtctccgtgtccttcttatcttatctcgtttccatggctactgcgtacataagcagcggcctgcggcgcttgcgcttcgcggtttacaactgccggttaatcagtaacttctggcaaaccatgatgatggagttggccactccctctatgcgcgctcgctcactcactcggccctggagaccaaaggtctccagactgccggcctctggccggcagggccgagtgagtgagcgagcgcgcatagagggagtggccaa

SEQ ID NO: 86 - DNA, 3098 bp, Adeno-associated virus
gaattcgccctttctacggctgcgtcaactggaccaatgagaactttcccttcaacgattgcgtcgacaagatggtgatctggtgggaggagggcaagatgacggccaaggtcgtggagtccgccaaggccattctcggcggcagcaaggtgcgcgtggaccaaaagtgcaagtcttccgcccagatcgatcccacccccgtgatcgtcacttccaacaccaacatgtgcgctgtgattgacgggaacagcaccaccttcgagcaccagcagccgttacaagaccggatgttcaaatttgaactcacccgccgtctggagcacgactttggcaaggtgacaaagcaggaagtcaaagagttcttccgctgggcgcaggatcacgtgaccgaggtggcgcatgagttctacgtcagaaagggtggagccaacaagagacccgcccccgatgacgcggataaaagcgagcccaagcgggcctgcccctcagtcgcggatccatcgacgtcagacgcggaaggagctccggtggactttgccgacaggtaccaaaacaaatgttctcgtcacgcgggcatgcttcagatgctgtttccctgcaagacatgcgagagaatgaatcagaatttcaacatttgcttcacgcacgggaccagagactgttcagaatgtttccccggcgtgtcagaatctcaaccggtcgtcagaaagaggacgtatcggaaactctgtgccattcatcatctgctggggcgggctcccgagattgcttgctcggcctgcgatctggtcaacgtggacctggatgaccgtgtttctgagcaataaatgacttaaaccaggtatggctgccgatggttatcttccagattggctcgaggacaacctctctgagggcattcgcgagtggtgggacttgaaacctggagccccgaaacccaaagccaaccagcaaaagcaggacgacggccggggtctggtgcttcctggctacaagtacctcggacccttcaacggactcgacaagggagagccggtcaacgaggcagacgccgcggccctcgagcacgacaaggcctacgacaagcagctcgagcagggggacaacccgtacctcaagtacaaccacgccgacgccgagtttcaggagcgtcttcaagaagatacgtcttttgggggcaacctcgggcgagcagtcttccaggccaagaagcgggttctcgaacctctcggtctggttgaggaaggcgctaagacggctcctggaaagaagagacccatagaatcccccgactcctccacgggcatcggcaagaaaggccagcagcccgctaaaaagaagctcaactttgggcagactggcgactcagagtcagtgcccgacccccaacctctcggagaacctcccgccgcgccctcaggtctgggatctggtacaatggctgcaggcggtggcgcaccaatggcagacaataacgaaggcgccgacggagtgggtaatgcctccggaaattggcattgcgattccacatggctgggcgacagagtcatcaccaccagcacccgcacctgggccctgcccacctacaacaaccacctctacaagcagatatcaagtcagagcggggctaccaacgacaaccacttcttcggctacagcaccccctggggctattttgacttcaacagattccactgccacttctcaccacgtgactggcagcgactcatcaacaacaactggggattccggcccagaaagctgcggttcaagttgttcaacatccaggtcaaggaggtcacgacgaacgacggcgttacgaccatcgctaataaccttaccagcacgattcaggtcttctcggactcggagtaccaactgccgtacgtcctcggctctgcgcaccagggctgcctccctccgttccctgcggacgtgttcatgattcctcagtacggatatctgactctaaacaacggcagtcagtctgtgggacgttcctccttctactgcctggagtactttccttctcagatgctgagaacgggcaataactttgaattcagctacacctttgaggaagtgcctttccacagcagctatgcgcacagccagagcctggaccggctgatgaatcccctcatcgaccagtacctgtactacctggcccggacccagagcactacggggtccacaagggagctgcagttccatcaggctgggcccaacaccatggccgagcaatcaaagaactggctgcccggaccctgttatcggcagcagagactgtcaaaaaacatagacagcaacaacaacagtaactttgcctggaccggggccactaaataccatctgaatggtagaaattcattaaccaacccgggcgtagccatggccaccaacaaggacgacgaggaccagttctttcccatcaacggagtgctggtttttggcgaaacgggggctgccaacaagacaacgctggaaaacgtgctaatgaccagcgaggaggagatcaaaaccaccaatcccgtggctacagaagaatacggtgtggtctccagcaacctgcaatcgtctacggccggaccccagacacagactgtcaacagccagggggctctgcccggcatggtctggcagaaccgggacgtgtacctgcagggtcccatctgggccaaaattcctcacacggacggcaactttcacccgtctcccctgatgggcggatttggactcaaacacccgcctcctcaaattctcatcaaaaacaccccggtacctgctaatcctccagaggtgtttactcctgccaagtttgcctcatttatcacgcagtacagcaccggccaggtcagcgtggagatcgagtgggaactgcagaaagaaaacagcaaacgctggaatccagagattcagtacacctcaaattatgccaagtctaataatgtggaatttgctgtcaacaacgaaggggtttatactgagcctcgccccattggcacccgttacctcacccgtaacctgtaattgcctgttaatcaataaaccggttaattcgtttcagttgaactttggtctctgcgaagggcgaattc

SEQ ID NO: 87 - protein, 728 aa, Adeno-associated virus
MAADGYLPDWLEDNLSEGIREWWDLKPGAPKPKANQQKQDDGRGLVLPGYKYLGPFNGLDKGEPVNEADAAALEHDKAYDKQLEQGDNPYLKYNHADAEFQERLQEDTSFGGNLGRAVFQAKKRVLEPLGLVEEGAKTAPGKKRPIESPDSSTGIGKKGQQPAKKKLNFGQTGDSESVPDPQPLGEPPAAPSGLGSGTMAAGGGAPMADNNEGADGVGNASGNWHCDSTWLGDRVITTSTRTWALPTYNNHLYKQISSQSGATNDNHFFGYSTPWGYFDFNRFHCHFSPRDWQRLINNNWGFRPRKLRFKLFNIQVKEVTTNDGVTTIANNLTSTIQVFSDSEYQLPYVLGSAHQGCLPPFPADVFMIPQYGYLTLNNGSQSVGRSSFYCLEYFPSQMLRTGNNFEFSYTFEEVPFHSSYAHSQSLDRLMNPLIDQYLYYLARTQSTTGSTRELQFHQAGPNTMAEQSKNWLPGPCYRQQRLSKNIDSNNNSNFAWTGATKYHLNGRNSLTNPGVAMATNKDDEDQFFPINGVLVFGETGAANKTTLENVLMTSEEEIKTTNPVATEEYGVVSSNLQSSTAGPQTQTVNSQGALPGMVWQNRDVYLQGPIWAKIPHTDGNFHPSPLMGGFGLKHPPPQILIKNTPVPANPPEVFTPAKFASFITQYSTGQVSVEIEWELQKENSKRWNPEIQYTSNYAKSNNVEFAVNNEGVYTEPRPIGTRYLTRNL

SEQ ID NO: 88 - DNA, 2495 bp, Adeno-associated virus
gaattcgccctttctacggctgcgtcaactagaccaatgagaactttcccttcaacgattgcgtcgacaagatggtgatctggtgggaggagggcaagatgacggccaaggtcgtggagtccgccaaggccattcatcatctgctggggcgggctcccgagattgcttgctcggcctgcgatctggtcaacgtggacctggatgactgtgtttctgagcaataaatgacttaaaccaggtatggctgccgatggttatcttccagattggctcgaggacaacctctctgagggcattcgcgagtggtgggacttgaaacctggagccccgaaacccaaagccaaccagcaaaagcaggacgacggccggggtctggtgcttcctggctacaagtacctcggacccttcaacggactcgacaagggagagccggtcaacgaggcagacgccgcggccctcgagcacgacaaggcctacgacaagcagctcgagcagggggacaacccgtacctcaagtacaaccacgccgacgccgagtttcaggagcgtcttcaagaagatacgtcttttgggggcaacctcgggcgagcagtcttccaggccaagaagcgggttctcgaacctctcggtctggttgaggaaggcgctaagacggctcctggaaagaagagacccatagaatcccccgactcctccacgggcatcggcaagaaaggccagcagcccgctaaaaagaagctcaactttgggcagactggcgactcagagtcagtgcccgaccctcaaccaatcggagaaccccccgcaggcccctctggtctgggatctggtacaatggctgcaggcggtggcgctccaatggcagacaataacgaaggcgccgacggagtgggtaatgcctccggaaattggcattgcgattccacatggctgggcgacagagtcatcaccaccagcacccgcacctgggccctgcccacctacaacaaccacctctacaagcagatatcaagtcagagcggggctaccaacgacaaccacttcttcggctacagcaccccctggggctattttgacttcaacagattccactgccacttctcaccacgtgactggcagcgactcatcaacaacaactggggattccggcccagaaagctgcggttcaagttgttcaacatccaggtcaaggaggtcacgacgaacgacggcgttacgaccatcgctaataaccttaccagcacgattcaggtcttctcggactcggagtaccaactgccgtacgtcctcggctctgcgcaccagggctgcctccctccgttccctgcggacgtgttcatgattcctcagtacggatatctgactctaaacaacggcagtcagtctgtgggacgttcctccttctactgcctggagtactttccttctcagatgctgagaacgggcaataactttgaattcagctacacctttgaggaagtgcctttccacagcagctatgcgcacagccagagcctggaccggctgatgaatcccctcatcgaccagtacctgtactacctggcccggacccagagcactacggggtccacaagggagctgcagttccatcaggctgggcccaacaccatggccgagcaatcaaagaactggctgcccggaccctgttatcggcagcagagactgtcaaaaaacatagacagcaacaacaccagtaactttgcctggaccggggccactaaataccatctgaatggtagaaattcattaaccaacccgggcgtagccatggccaccaacaaggacgacgaggaccagttctttcccatcaacggagtgctggtttttggcaaaacgggggctgccaacaagacaacgctggaaaacgtgctaatgaccagcgaggaggagatcaaaaccaccaatcccgtggctacagaacagtacggtgtggtctccagcaacctgcaatcgtctacggccggaccccagacacagactgtcaacagccagggggctctgcccggcatggtctggcagaaccgggacgtgtacctgcagggtcccatctgggccaaaattcctcacacggacggcaactttcacccgtctcccctgatgggcggatttggactcaaacacccgcctcctcaaattctcatcaaaaacaccccggtacctgctaatcctccagaggtgtttactcctgccaagtttgcctcatttatcacgcagtacagcaccggccaggtcagcgtggagatcgagtgggaactgcagaaagaaaacagcaaacgctggaatccagagattcagtacacctcaaattatgccaagtctaataatgtggaatttgctgtcaacaacgaaggggtttatactgagcctcgccccattggcacccgttacctcacccgtaacctgtaattgcctgttaatcaataaaccggttaattcgtttcagttgaactttggtctctgcgaagggcgaattc

SEQ ID NO: 89 - protein, 728 aa, Adeno-associated virus
MAADGYLPDWLEDNLSEGIREWWDLKPGAPKPKANQQKQDDGRGLVLPGYKYLGPFNGLDKGEPVNEADAAALEHDKAYDKQLEQGDNPYLKYNHADAEFQERLQEDTSFGGNLGRAVFQAKKRVLEPLGLVEEGAKTAPGKKRPIESPDSSTGIGKKGQQPAKKKLNFGQTGDSESVPDPQPIGEPPAGPSGLGSGTMAAGGGAPMADNNEGADGVGNASGNWHCDSTWLGDRVITTSTRTWALPTYNNHLYKQISSQSGATNDNHFFGYSTPWGYFDFNRFHCHFSPRDWQRLINNNWGFRPRKLRFKLFNIQVKEVTTNDGVTTIANNLTSTIQVFSDSEYQLPYVLGSAHQGCLPPFPADVFMIPQYGYLTLNNGSQSVGRSSFYCLEYFPSQMLRTGNNFEFSYTFEEVPFHSSYAHSQSLDRLMNPLIDQYLYYLARTQSTTGSTRELQFHQAGPNTMAEQSKNWLPGPCYRQQRLSKNIDSNNTSNFAWTGATKYHLNGRNSLTNPGVAMATNKDDEDQFFPINGVLVFGKTGAANKTTLENVLMTSEEEIKTTNPVATEQYGVVSSNLQSSTAGPQTQTVNSQGALPGMVWQNRDVYLQGPIWAKIPHTDGNFHPSPLMGGFGLKHPPPQILIKNTPVPANPPEVFTPAKFASFITQYSTGQVSVEIEWELQKENSKRWNPEIQYTSNYAKSNNVEFAVNNEGVYTEPRPIGTRYLTRNL

SEQ ID NO: 90 - DNA, 2504 bp, Adeno-associated virus
gaattcgccctttctacggctgcgtcaactggaccaatgagaactttcccttcaacgattgcgtcgacaagatggtgatctggtgggaggagggcaagatgacggccaaggtcgtggagtccgccaaggccattcatcatctgctggggcgggctcccgagattgcttgctcggcctgcgatctggtcaacgtggacctggatgactgtgtttctgagcaataaatgacttaaaccaggtatggctgccgatggttatcttccagattggctcgaggacaacctctctgagggcattcgcgagtggtgggacttgaaacctggagccccgaaacccaaagccaaccagcaaaagcaggacgacggccggggtctggtgcttcctggctacaagtacctcggacccttcaacggactcgacaagggagagccggtcaacgaggcagacgccgcggccctcgagcacgacaaggcctacgacaagcagctcgagcagggggacaacccgtacctcaagtacaaccacgccgacgccgagtttcaggagcgtcttcaagaagatacgtcttttgggggcaacctcgggcgagcagtcttccaggccaagaagcgggttctcgaacctctcggtctggttgaggaaggcgctaagacggctcctggaaagaagagacccatagaatcccccgactcctccacgggcatcggcaagaaaggccagcagcccgctaaaaagaagctcaactttgggcagactggcgactcagagtcagtgcccgaccctcaaccaatcggagaaccccccgcaggcccctctggtctgggatctggtacaatggctgcaggcggtggcgctccaatggcagacaataacgaaggcgccgacggagtgggtaatgcctccggaaattggcattgcgattccacatggctgggcgacagagtcatcaccaccagcacccgcacctgggccctgcccacctacaacaaccacctctacaagcagatatcaagtcagagcggggctaccaacgacaaccacttcttcggctacagcaccccctggggctattttgacttcaacagattccactgccacttctcatcacgtgactggcagcgactcatcaacaacaactggggattccggcccaagagactcaacttcaagctcttcaacatccaggtcaaggaggtcacgcagaatgaaggcaccaagaccatcgccaataaccttaccagcacgattcaggtctttacggactcggaataccggctcccgtacgtcctcggctctgcgcaccagggctgcctgcctccgttcccggcggacgtcttcatgattcctcagtacgggtacctgactctgaacaacggcagtcaggccgtgggccgttcctccttctactgcctggagtactttccttctcaaatgctgagaacgggcaacaactttgagttcagctaccagtttgaggacgtgccttttcacagcagctacgcgcacagccaaagcctggaccggctgatgaaccccctcatcgaccagtacctgtactacctgtctcggactcagtccacgggaggtaccgcaggaactcagcagttgctattttctcaggccgggcctaataacatgtcggctcaggccaaaaactggctacccgggccctgctaccggcagcaacgcgtctccacgacactgtcgcaaaataacaacagcaactttgcttggaccggtgccaccaagtatcatctgaatggcagagactctctggtaaatcccggtgtcgctatggcaacgcacaaggacgacgaagagcgattttttccatccagcggagtcttgatgtttgggaaacagggagctggaaaagacaacgtggactatagcagcgttatgctaaccagtgaggaagaaatcaaaaccaccaacccagtggccacagaacagtacggcgtggtggccgataacctgcaacagcaaaacgccgctcctattgtaggggccgtcaacagtcaaggagccttacctggcatggtctggcagaaccgggacgtgtacctgcagggtcctatctgggccaagattcctcacacggacggcaactttcatccttcgccgctgatgggaggctttggactgaaacacccgcctcctcagatcctgattaagaatacacctgttcccgcggatcctccaactaccttcagtcaagccaagccggcgtcgttcatcacgcagtacagcaccggacaggtcagcgtggaaattgaatgggagctgcagaaagagaacagcaagcgctggaacccagagattcagtatacttccaactactacaaatctacaaatgtggactttgctgtcaatactgagggtacttattcagagcctcgccccattggcacccgttacctcacccgtaacctgtaattgcctgttaatcaataaaccggttaattcgtttcagttgaactttggtctctgcgaagggcgaattc

SEQ ID NO: 91 - protein, 731 aa, Adeno-associated virus
MAADGYLPDWLEDNLSEGIREWWDLKPGAPKPKANQQKQDDGRGLVLPGYKYLGPFNGLDKGEPVNEADAAALEHDKAYDKQLEQGDNPYLKYNHADAEFQERLQEDTSFGGNLGRAVFQAKKRVLEPLGLVEEGAKTAPGKKRPIESPDSSTGIGKKGQQPAKKKLNFGQTGDSESVPDPQPIGEPPAGPSGLGSGTMAAGGGAPMADNNEGADGVGNASGNWHCDSTWLGDRVITTSTRTWALPTYNNHLYKQISSQSGATNDNHFFGYSTPWGYFDFNRFHCHFSSRDWQRLINNNWGFRPKRLNFKLFNIQVKEVTQNEGTKTIANNLTSTIQVFTDSEYRLPYVLGSAHQGCLPPFPADVFMIPQYGYLTLNNGSQAVGRSSFYCLEYFPSQMLRTGNNFEFSYQFEDVPFHSSYAHSQSLDRLMNPLIDQYLYYLSRTQSTGGTAGTQQLLFSQAGPNNMSAQAKNWLPGPCYRQQRVSTTLSQNNNSNFAWTGATKYHLNGRDSLVNPGVAMATHKDDEERFFPSSGVLMFGKQGAGKDNVDYSSVMLTSEEEIKTTNPVATEQYGVVADNLQQQNAAPIVGAVNSQGALPGMVWQNRDVYLQGPIWAKIPHTDGNFHPSPLMGGFGLKHPPPQILIKNTPVPADPPTTFSQAKPASFITQYSTGQVSVEIEWELQKENSKRWNPEIQYTSNYYKSTNVDFAVNTEGTYSEPRPIGTRYLTRNL

SEQ ID NO: 92 - DNA, 3128 bp, Adeno-associated virus
gaattcgccctttctacggctgcgtcaactggaccaatgagaactttcccttcaacgattgcgtcgacaagatggtgatctggtgggaggagggcaagatgacggccaaggtcgtggagtccgccaaggccattctcggcggcagcaaggtgcgcgtggaccaaaagtgcaagtcttccgcccagatcgatcccacccccgtgatcgtcacttccaacaccaacatgtgcgccgtgattgacgggaacagcaccaccttcgagcaccagcagccgttacaagaccggatgttcaaatttgaactcacccgccgtctggagcacgactttggcaaggtgacaaagcaggaagtcaaagagttcttccgctgggcgcaggatcacgtgaccgaggtggcgcatgagttctacgtcagaaagggtggagccaacaagagacccgcccccgatgacgcggataaaagcgagcccaagcgggcctgcccctcagtcgcggatccatcgacgtcagacgcggaaggagctccggtggactttgccgacaggtaccaaaacaaatgttctcgtcacgcgggcatgcttcagatgctgtttccctgcaagacatgcgagagaatgaatcagaatttcaacatttgcttcacgcacgggaccagagactgttcagaatgtttccccggcgtgtcagaatctcaaccggtcgtcagaaagaggacgtatcggaaactctgtgccattcatcatctgctagggcgggctcccgagattgcttgctcggcctgcgatctggtcaacgtggacctggatgactgtgtttctgagcaataaatgacttaaaccaggtatggctgccgatggttatcttccagattggctcgaggacaacctctctgagggcattcgcgagtggtgggacttgaaacctggagccccgaaacccaaagccaaccagcaaaagcaggacgacggccggggtctggtgcttcctggctacaagtacctcggacccttcaacggactcgacaagggggagcccgtcaacgcggcggacgcagcggccctcgagcacgacaaggcctacgaccagcagctcaaagcgggtgacaatccgtacctgcggtataaccacgccgacgccgagtttcaggagcgtctgcaagaagatacgtcttttgggggcaacctcgggcgagcagtcttccaggccaagaagcgggttctcgaacctctcggtctggttgaggaaggcgctaagacggctcctggaaagaagagaccggtagagccatcaccccagcgttctccagactcctctacgggcatcggcaagacaggccagcagcccgcgaaaaagagactcaactttgggcagactggcgactcagagtcagtgcccgaccctcaaccaatcggagaaccccccgcaggcccctctggtctgggatctggtacaatggctgcaggcggtggcgctccaatggcagacaataacgaaggcgccgacggagtgggtagttcctcaggaaattggcattgcgattccacatggctgggcgacagagtcatcaccaccagcacccgaacctgggccctccccacctacaacaaccacctctacaagcaaatctccaacgggacatcgggaggaagcaccaacgacaacacctacttcggctacagcaccccctgggggtattttgactttaacagattccactgccacttctcaccacgtgactggcagcgactcatcaacaacaactggggattccggcccaagagactcaacttcaagctcttcaacatccaggtcaaggaggtcacgcagaatgaaggcaccaagaccatcgccaataaccttaccagcacgattcaggtctttacggactcggaataccagctcccgtacgtcctcggctctgcgcaccagggctgcctgcctccgttcccggcggacgtcttcatgattcctcagtacgggtacctgactctgaacaacggcagtcaggccgtgggccgttcctccttctactgcctggagtactttccttctcaaatgctgagaacgggcaacaactttgagttcagctaccagtttgaggacgtgccttttcacagcagctacgcgcacagccaaagcctggaccggctgatgaaccccctcatcgaccagtacctgtactacctgtctcggactcagtccacgggaggtaccgcaggaactcagcagttgctattttctcaggccgggcctaataacatgtcggctcaggccaaaaactggctacccgggccctgctaccggcagcaacgcgtctccacgacactgtcgcaaaataacaacagcaactttgcttggaccggtgccaccaagtatcatctgaatggcagagactctctggtaaatcccggtgtcgctatggcaacgcacaaggacgacgaagagcgattttttccatccagcggagtcttgatgtttgggaaacagggagctggaaaagacaacgtggactatagcagcgttatgctaaccagtgaggaagaaatcaaaaccaccaacccagtggccacagaacagtacggcgtggtggccgataacctgcaacagcaaaacgccgctcctattgtaggggccgtcaacagtcaaggagccttacctggcatggtctggcagaaccgggacgtgtacctgcagggtcctatctgggccaagattcctcacacggacggcaactttcatccttcgccgctgatgggaggctttggactgaaacacccgcctcctcagatcctgattaagaatacacctgttcccgcggatcctccaactaccttcagtcaagccaagctggcgtcgttcatcacgcagtacagcaccggacaggtcagcgtggaaattgaatgggagctgcagaaagagaacagcaagcgctggaacccagagattcagtatacttccaactactacaaatctacaaatgtggactttgctgtcaatactgagggtacttattcagagcctcgccccattggcacccgttacctcacccgtaacctgtaattgcctgttaatcaataaaccggctaattcgtttcagttgaactttggtctctgcgaagggcgaattc

SEQ ID NO: 93 - protein, 738 aa, Adeno-associated virus
MAADGYLPDWLEDNLSEGIREWWDLKPGAPKPKANQQKQDDGRGLVLPGYKYLGPFNGLDKGEPVNAADAAALEHDKAYDQQLKAGDNPYLRYNHADAEFQERLQEDTSFGGNLGRAVFQAKKRVLEPLGLVEEGAKTAPGKKRPVEPSPQRSPDSSTGIGKTGQQPAKKRLNFGQTGDSESVPDPQPIGEPPAGPSGLGSGTMAAGGGAPMADNNEGADGVGSSSGNWHCDSTWLGDRVITTSTRTWALPTYNNHLYKQISNGTSGGSTNDNTYFGYSTPWGYFDFNRFHCHFSPRDWQRLINNNWGFRPKRLNFKLFNIQVKEVTQNEGTKTIANNLTSTIQVFTDSEYQLPYVLGSAHQGCLPPFPADVFMIPQYGYLTLNNGSQAVGRSSFYCLEYFPSQMLRTGNNFEFSYQFEDVPFHSSYAHSQSLDRLMNPLIDQYLYYLSRTQSTGGTAGTQQLLFSQAGPNNMSAQAKNWLPGPCYRQQRVSTTLSQNNNSNFAWTGATKYHLNGRDSLVNPGVAMATHKDDEERFFPSSGVLMFGKQGAGKDNVDYSSVMLTSEEEIKTTNPVATEQYGVVADNLQQQNAAPIVGAVNSQGALPGMVWQNRDVYLQGPIWAKIPHTDGNFHPSPLMGGFGLKHPPPQILIKNTPVPADPPTTFSQAKLASFITQYSTGQVSVEIEWELQKENSKRWNPEIQYTSNYYKSTNVDFAVNTEGTYSEPRPIGTRYLTRNL

SEQ ID NO: 94 - DNA, 3084 bp, Adeno-associated virus
gaattcgccctttctacggctgcatcaactggaccaatgagaactttcccttcaacgattgcgtcgacaagatggtgatctggtgggaggagggcaagatgacggccaaggtcgtggagtccgccaaggccattctcggcggcagcaaggtgcgcgtggaccaaaagtgcaagtcgtccgcccagatcgaccccacccccgtgatcgtcacctccaacaccaacatgtgcgccgtgattgacgggaacagcaccaccttcgagcaccagcagccgttgcaggaccggatgttcaagttcgaactcacccgccgtctggagcacgactttggcaaggtgaccaagcaggaagtcaaagagttcttccgctgggcgcaggatcacgtgaccgaggtggcgcatgagttctacgtcagaaagggcggagccagcaaaagacccgcccccgatgacgcggatataagcgagcccaagcgggcctgcccctcagtcgcggatccatcgacgtcagacgcggaaggagctccggtggactttgccgacaggtaccaaaacaaatgttctcgtcacgcgggcatgcttcagatgctgtttccctgcaaaacgtgcgagaaaatgaatcagaatttcaacatttgcttcacgcacggggtcagagactgctcagaatgtttccccggtgcatcagaatctcaaccggtcgtcagaaaaaaaacgtatcagaaactgtgtgccattcatcatctgctggggcgggcacccgagattgcttgctcggcctgcgatctggtcaacgtggacctggacgactgtgtttctgagcaataaatgacttaaaccaggtatggctgccgatggttatcttccagattggcttgaggacaacctctctgagggcattcgcgagtggtgggacctgaaacctggagccccgaaacccaaagccaaccagcaaaagcaggacgacggccggggtctggtgcttcctggctacaagtacctcggacccttcaacggactcgacaagggggagcccgtcaacgcggcggacgcagcggccctcgagcacgacaaggcctacgaccagcagctcaaagcgggtgacaatccgtacctgcggtataaccacgccgacgccgagtttcaggagcgtctgcaagaagatacgtcttttgggggcaacctcgggcgagcagtcttccaggccaagaagcgggttctcgaacctctcggtctggttgaggaaggcgctaagacggctcctggaaagaagagaccggtagagccatcacctcagcgttcccccgactcctccacgggcatcggcaagaaaggccaccagcccgcgagaaagagactgaactttgggcagactggcgactcggagtcagtccccgaccctcaaccaatcggagaaccaccagcaggcccctctggtctgggatctggtacaatggctgcaggcggtggcgctccaatggcagacaataacgaaggcgccgacggagtgggtagttcctcaggaaattggcattgcgattccacatggctgggcgacagagtcatcaccaccagcacccgaacctgggccctgcccacctacaacaaccatctctacaagcaaatctccaacgggacatcgggaggaagcactaacgacaacacctactttggctacagcaccccctgggggtattttgacttcaacagattccactgccacttctcaccacgtgactggcagcgactcatcaacaataactggggattccggcccaagagactcaacttcaagctcttcaacatccaggtcaaggaggtcacgcagaatgaaggcaccaagaccatcgccaataaccttaccagcacgattcaggtgtttacggactcggaataccagctcccgtacgtccccggctctgcgcaccagggctgcctccctccgttcccggcggacgtcttcatgattcctcagtacgggtatctgaccctaaacaatggcagtcaggctgtgggccgttcctccttctactgcctggaatacttcccttctcaaatgctgaggacgggcaacaactttgaattcagctacaccttcgaggacgtgcctttccacagcagctacgcgcacagccagagcctggaccggctgatgaaccctctcatcgaccagtacctgtattacttatccagaactcagtccacaggaggaactcaaggtactcagcaattgttattttctcaagccgggcccgcaaacatgtcggctcaggccaagaactggctacctggaccgtgttaccgtcagcaacgagtttccacgacactgtcgcaaaacaacaacagcaattttgcttggaccggtgccaccaagtatcacctgaatggcagagactccctggttaatcccggcgttgccatggctacccacaaggacgacgaggagcgcttcttcccgtcaagcggagttctaatgtttggcaagcagggggctggaaaagacaatgtggactacagcagcgtgatgctcaccagcgaagaagaaattaaaactactaacccagtggctacagagcagtatggtgtggtggcagacaacctgcagcagaccaacggagctcccattgtgggaactgtcaacagccagggggccttacctggtatggtctggcaaaaccgggacgtgtacctgcagggccccatctgggccaaaattcctcacacggacggcaactttcatccttcgccgctgatgggaggctttggactgaaacacccgcctcctcagatcctggtgaaaaacactcctgttcctgcggatcctccgaccaccttcagccaggccaagctggcttcttttatcacgcagtacagcaccggacaggtcagcgtggaaatcgaatgggagctgcagaaagaaaacagcaagcgctggaacccagagattcagtatacttccaactactacaaatctacaaatgtggactttgctgtcaatactgagggtacttattcagagcctcgccccattggcactcgttatctcacccgtaatctgtaattgcttgttaatcaataaaccggt

SEQ ID NO: 95 - protein, 738 aa, Adeno-associated virus
MAADGYLPDWLEDNLSEGIREWWDLKPGAPKPKANQQKQDDGRGLVLPGYKYLGPFNGLDKGEPVNAADAAALEHDKAYDQQLKAGDNPYLRYNHADAEFQERLQEDTSFGGNLGRAVFQAKKRVLEPLGLVEEGAKTAPGKKRPVEPSPQRSPDSSTGIGKKGHQPARKRLNFGQTGDSESVPDPQPIGEPPAGPSGLGSGTMAAGGGAPMADNNEGADGVGSSSGNWHCDSTWLGDRVITTSTRTWALPTYNNHLYKQISNGTSGGSTNDNTYFGYSTPWGYFDFNRFHCHFSPRDWQRLINNNWGFRPKRLNFKLFNIQVKEVTQNEGTKTIANNLTSTIQVFTDSEYQLPYVPGSAHQGCLPPFPADVFMIPQYGYLTLNNGSQAVGRSSFYCLEYFPSQMLRTGNNFEFSYTFEDVPFHSSYAHSQSLDRLMNPLIDQYLYYLSRTQSTGGTQGTQQLLFSQAGPANMSAQAKNWLPGPCYRQQRVSTTLSQNNNSNFAWTGATKYHLNGRDSLVNPGVAMATHKDDEERFFPSSGVLMFGKQGAGKDNVDYSSVMLTSEEEIKTTNPVATEQYGVVADNLQQTNGAPIVGTVNSQGALPGMVWQNRDVYLQGPIWAKIPHTDGNFHPSPLMGGFGLKHPPPQILVKNTPVPADPPTTFSQAKLASFITQYSTGQVSVEIEWELQKENSKRWNPEIQYTSNYYKSTNVDFAVNTEGTYSEPRPIGTRYLTRNL

SEQ ID NO: 96 - DNA, 3123 bp, Adeno-associated virus
gaattcgcccttggctgcgtcaactggaccaatgagaactttcccttcaacgattgcgtcgacaagatggtgatctggtgggaggagggcaagatgacggccaaggtcgtggagtccgccaaggccattctcggcggcagcaaggtgcgcgtggaccaaaagtgcaagtcgtccgcccagatcgaccccacccccgtgatcgtcacctccaacaccaacatgtgcgccgtgattgacgggaacagcaccaccttcgagcaccagcagccgttgcaggaccggatgttcaagttcgaactcacccgccgtctggagcacgactttggcaaggtgaccaagcaggaagtcaaagagttcttccgctgggcgcaggatcacgtgaccgaggtggcgcatgagttctacgtcagaaagggcggagccagcaaaagacccgcccccgatgacgcggatataagcgagcccaagcgggcctgcccctcagtcgcggatccatcgacgtcagacgcggaaggagctccggtggactttgccgacaggtaccaaaacaaatgttctcgtcacgcgggcatgctccagatgctgtttccctgcaaaacgtgcgagagaatgaatcagaatttcaacatttgcttcacgcacggggtcagagactgctcagaatgtttccccggtgcatcagaatctcaaccggtcgtcagaaaaaaaacgtatcagaaactgtgtgccattcatcatctgctggggcgggcacccgagattgcttgctcggcctgcgatctggtcaacgtggacctggacgactgtgtttctgagcaataaatgacttaaaccaggtatggctgccgatggttatcttccagattggcttgaggacaacctctctgagggcattcgcgagtggtgggacctgaaacctggagccccgaaacccaaagccaaccagcaaaagcaggacgacggccggggtctggtgcttcctggctacaagtacctcggacccttcaacggactcgacaagggggagcccgtcaacgcggcggacgcagcggccctcgagcacgacaaggcctacgaccagcagctcaaagcgggtgacaatccgtacctgcggtataaccacgccgacgccgagtttcaggagcgtctgcaagaagatacgtcttttgggggcaacctcgggcgagcagtcttccaggccaagaagcgggttctcgaacctctcggtctggttgaggaaggcgctaagacggctcctggaaagaagagaccggtagagccatcacctcagcgttcccccgactcctccacgggcatcggcaagaaaggccaccagcccgcgagaaagagactgaactttgggcagactggcgactcggagtcagtccccgaccctcaaccaatcggagaaccaccagcaggcccctctggtctgggatctggtacaatggctgcaggcggtggcgctccaatggcagacaataacgaaggcgccgacggagtgggtagttcctcaggaaattggcattgcgattccacatggctgggcgacagagtcatcaccaccagcacccgaacctgggccctgcccacctacaacaaccatctctacaagcaaatctccaacgggacatcgggaggaagcactaacgacaacacctactttggctacagcaccccctgggggtattttgacttcaacagattccactgccacttctcaccacgtgactggcagcgactcatcaacaataactggggattccggcccaagagactcaacttcaagctcttcaacatccaggtcaaggaggtcacgcagaatgaaggcaccaagaccatcgccaataaccttaccagcacgattcaggtgtttacggactcggaataccagctcccgtacgtcctcggctctgcgcaccagggctgcctccctccgttcccggcggacgtcttcatgattcctcagtacgggtatctgaccctaaacaatggcagtcaggctgtgggccgttcctccttctactgcctggaatacttcccttctcaaatgctgaggacgggcaacaactttgaattcagctacaccttcgaggacgtgcctttccacagcagctacgcgcacagccagagcctggaccggctgatgaaccctctcatcgaccagtacctgtattacttatccagaactcagtccacaggaggaactcaaggtactcagcaattgttattttctcaagccgggcccgcaaacatgtcggctcaggccaagaactggctacctggaccgtgttaccgtcagcaacgagtttccacgacactgtcgcaaaacaacaacagcaattttgcttggaccggtgccaccaagtatcacctgaatggcagagactccctggttaatcccggcgttgccatggctacccacaaggacgacgaggagcgcttcttcccgtcaagcggagttctaatgtttggcaagcagggggctggaaaagacaatgtggactacagcagcgtgatgctcaccagcgaagaagaaattaaaactactaacccagtggctacagagcagtatggtgtggtggcagacaacctgcagcagaccaacggagctcccattgtgggaactgtcaacagccagggggccttacctggtatggtctggcaaaaccgggacgtgtacctgcagggccccatctgggccaaaattcctcacacggacggcaactttcatccttcgccgctgatgggaggctttggactgaaacacccgcctcctcagatcctggtgaaaaacactcctgttcctgcggatcctccgaccaccttcagccaggccaagctggcttcttttatcacgcagtacagcaccggacaggtcagcgtggaaatcgaatgggagctgcagaaagaaaacagcaagcgctggaacccagagattcagtatacttccaactactacaaatctacaaatgtggactttgctgtcaatactgagggtacttattcagagcctcgccccattggcactcgttatctcacccgtaatctgtaattgcttgttaatcaataaaccggttaattcgtttcagttgaactttggtctctgcgaagggcgaattc

SEQ ID NO: 97 - protein, 738 aa, Adeno-associated virus
MAADGYLPDWLEDNLSEGIREWWDLKPGAPKPKANQQKQDDGRGLVLPGYKYLGPFNGLDKGEPVNAADAAALEHDKAYDQQLKAGDNPYLRYNHADAEFQERLQEDTSFGGNLGRAVFQAKKRVLEPLGLVEEGAKTAPGKKRPVEPSPQRSPDSSTGIGKKGHQPARKRLNFGQTGDSESVPDPQPIGEPPAGPSGLGSGTMAAGGGAPMADNNEGADGVGSSSGNWHCDSTWLGDRVITTSTRTWALPTYNNHLYKQISNGTSGGSTNDNTYFGYSTPWGYFDFNRFHCHFSPRDWQRLINNNWGFRPKRLNFKLFNIQVKEVTQNEGTKTIANNLTSTIQVFTDSEYQLPYVLGSAHQGCLPPFPADVFMIPQYGYLTLNNGSQAVGRSSFYCLEYFPSQMLRTGNNFEFSYTFEDVPFHSSYAHSQSLDRLMNPLIDQYLYYLSRTQSTGGTQGTQQLLFSQAGPANMSAQAKNWLPGPCYRQQRVSTTLSQNNNSNFAWTGATKYHLNGRDSLVNPGVAMATHKDDEERFFPSSGVLMFGKQGAGKDNVDYSSVMLTSEEEIKTTNPVATEQYGVVADNLQQTNGAPIVGTVNSQGALPGMVWQNRDVYLQGPIWAKIPHTDGNFHPSPLMGGFGLKHPPPQILVKNTPVPADPPTTFSQAKLASFITQYSTGQVSVEIEWELQKENSKRWNPEIQYTSNYYKSTNVDFAVNTEGTYSEPRPIGTRYLTRNL

SEQ ID NO: 98 - DNA, 3122 bp, Adeno-associated virus
gaattcgccctttctacggctgcgtcaactggaccaatgagaactttcccttcaacgattgcgtcgacaagatggtgatctggtgggaggagggcaagatgacggccaaggtcgtggagtccgccaaggccattctcggcggcagcaaggtgcgtgtggaccaaaagtgcaagtcttccgcccagatcgatcccacccccgtgatcgtcacctccaacaccaacatgtgcgccgtgattgacgggaacagcgccaccttcgagcaccagcagccgttgcaggaccggatgttcaaatttgaactcacccgccgtctggagcatgactttggcaaggtgacgaagcaggaagtcaaagagttcttccgctgggcgcaggatcacgtgaccgaggtggcgcatgagttccacgtcagaaagggtggagccaacaagagacccgcccccgatgacgcggatataagcgagcccaagcgggcctgcccctcagtcgcggatccatcgacgtcagacgcggaaggagctccggtggactttgccgacaggtaccaaaacaaatgttctcgtcacgcgggcatgcttcagatgctgtttccctgcaagacatgcgagagaatgaatcagaatttcaacatttgcttcacgcacgggaccagagactgttcagaatgtttccccggcgtgtcagaatctcaaccggtcgtcagaaagaggacgtatcggaaactctgtgcgattcatcatctgctggggcgggctcccgagattgcttgctcggcctgcgatctggtcaacgtggacctggatgactgtgtttctgagcaataaatgacttaaaccaggtatggctgccgatggttatcttccagattggctcgaggacaacctctctgagggcattcgcgagtggtgggacttgaaacctggagccccgaaacccaaagccaaccagcaaaagcaggacgacggccggggtctggtgcttcctggctacaagtacctcggacccttcaacggactcgacaagggggagcccgtcaacgcggcggacgcagcggccctcgagcacgacaaagcctacgaccagcagctcaaagcgggtgacaatccgtacctgcggtataatcacgccgacgccgagtttcaggagcgtctgcaagaagatacgtcttttgggggcaacctcgggcgagcagtcttccaggccaagaagcgggttctcgaacctctcggtctggttgaggaaggcgctaagacggctcctggaaagaagagactggtagagcagtcgccacaagagccagactcctcctcgggcatcggcaagacaggccagcagcccgctaaaaagagactcaattttggtcagactggcgactcagagtcagtccccgacccacaacctctcggagaacctccagcagccccctcaggtctgggacctaatacaatggcttcaggcggtggcgctccaatggcagacaataacgaaggcgccgacggagtgggtaattcctcgggaaattggcattgcgattccacatggctgggggacagagtcatcaccaccagcacccgaacctgggccctgcccacctacaacaaccacctctacaagcaaatctccaacggcacctcgggaggaagcaccaacgacaacacctattttggctacagcaccccctgggggtattttgacttcaacagattccactgtcacttttcaccacgtgactggcaacgactcatcaacaacaattggggattccggcccaaaagactcaacttcaagctgttcaacatccaggtcaaggaagtcacgacgaacgaaggcaccaagaccatcgccaataatctcaccagcaccgtgcaggtctttacggactcggagtaccagttaccgtacgtgctaggatccgctcaccagggatgtctgcctccgttcccggcggacgtcttcacggttcctcagtacggctatttaactttaaacaatggaagccaagccctgggacgttcctccttctactgtctggagtatttcccatcgcagatgctgagaaccggcaacaactttcagttcagctacaccttcgaggacgtgcctttccacagcagctacgcgcacagccagagcctggacaggctgatgaatcccctcatcgaccagtacctgtactacctggtcagaacgcaaacgactggaactggagggacgcagactctggcattcagccaagcgggtcctagctcaatggccaaccaggctagaaattgggtgcccggaccttgctaccggcagcagcgcgtctccacgacaaccaaccagaacaacaacagcaactttgcctggacgggagctgccaagtttaagctgaacggccgagactctctaatgaatccgggcgtggcaatggcttcccacaaggatgacgacgaccgcttcttcccttcgagcggggtcctgatttttggcaagcaaggagccgggaacgatggagtggattacagccaagtgctgattacagatgaggaagaaatcaaggctaccaaccccgtggccacagaagaatatggagcagtggccatcaacaaccaggccgccaatacgcaggcgcagaccggactcgtgcacaaccagggggtgattcccggcatggtgtggcagaatagagacgtgtacctgcagggtcccatctgggccaaaattcctcacacggacggcaactttcacccgtctcccctgatgggcggctttggactgaagcacccgcctcctcaaattctcatcaagaacacaccggttccagcggacccgccgcttaccttcaaccaggccaagctgaactctttcatcacgcagtacagcaccggacaggtcagcgtggaaatcgagtgggagctgcagaaagaaaacagcaaacgctggaatccagagattcaatacacttccaactactacaaatctacaaatgtggactttgctgtcaacacggaaggagtttatagcgagcctcgccccattggcacccgttacctcacccgcaacctgtaattacatgttaatcaataaaccggttaattcgtttcagttgaactttggtctctgcgaagggcgaattc

SEQ ID NO: 99 - protein, 736 aa, Adeno-associated virus
MAADGYLPDWLEDNLSEGIREWWDLKPGAPKPKANQQKQDDGRGLVLPGYKYLGPFNGLDKGEPVNAADAAALEHDKAYDQQLKAGDNPYLRYNHADAEFQERLQEDTSFGGNLGRAVFQAKKRVLEPLGLVEEGAKTAPGKKRLVEQSPQEPDSSSGIGKTGQQPAKKRLNFGQTGDSESVPDPQPLGEPPAAPSGLGPNTMASGGGAPMADNNEGADGVGNSSGNWHCDSTWLGDRVITTSTRTWALPTYNNHLYKQISNGTSGGSTNDNTYFGYSTPWGYFDFNRFHCHFSPRDWQRLINNNWGFRPKRLNFKLFNIQVKEVTTNEGTKTIANNLTSTVQVFTDSEYQLPYVLGSAHQGCLPPFPADVFTVPQYGYLTLNNGSQALGRSSFYCLEYFPSQMLRTGNNFQFSYTFEDVPFHSSYAHSQSLDRLMNPLIDQYLYYLVRTQTTGTGGTQTLAFSQAGPSSMANQARNWVPGPCYRQQRVSTTTNQNNNSNFAWTGAAKFKLNGRDSLMNPGVAMASHKDDDDRFFPSSGVLIFGKQGAGNDGVDYSQVLITDEEEIKATNPVATEEYGAVAINNQAANTQAQTGLVHNQGVIPGMVWQNRDVYLQGPIWAKIPHTDGNFHPSPLMGGFGLKHPPPQILIKNTPVPADPPLTFNQAKLNSFITQYSTGQVSVEIEWELQKENSKRWNPEIQYTSNYYKSTNVDFAVNTEGVYSEPRPIGTRYLTRNL

SEQ ID NO: 100 - DNA, 3117 bp, Adeno-associated virus
gaattcgcccttggctgcgtcaactggaccaatgagaactttcccttcaacgattgcgtcgacaagatggtgatctggtgggaggagggcaagatgacggccaaggtcgtggagtccgccaaggccattctcggcggcagcaaggtgcgtgtggaccaaaagtgcaagtcttccgcccagatcgatcccacccccgtgatcgtcacctccaacaccaacatgtgcgccgtgattgacgggaacagcaccaccttcgagcaccagcagccgttgcaggaccggatgttcaaatttgaactcacccgccgtctggagcatgactttggcaaggtgacgaagcaggaagtcaaagagttcttccgctgggcgcaggatcacgtgaccgaggtggcgcatgagttccacgtcagaaagggtggagccaacaagagacccgcccccgatgacgcggatataagcgagcccaagcgggcctgcccctcagtcgcggatccatcgacgtcagacgcggaaggagctccggtggactttgccgacaggtaccaaaacaaatgttctcgtcacgcgggcatgcttcagatgctgtttccctgcaagacatgcgagagaatgaatcagaatttcaacatttgcttcacgcacgggaccagagactgttcagaatgtttccccggcgtgtcagaatctcaaccggtcgtcagaaagaggacgtatcggaaactctgtgcgattcatcatctgctggggcgggctcccgagattgcttgctcggcctgcgatctggtcaacgtggacctggatgactgtgtttctgagcaataaatgacttaaaccaggtatggctgccgatggttatcttccagattggctcgaggacaacctctctgagggcattcgcgagtggtgggacttgaaacctggagccccgaaacccaaagccaaccagcaaaagcaggacgacggccggggtctggtgcttcctggctacaagtacctcggacccttcaacggactcgacaagggggagcccgtcaacgcggcggacgcagcggccctcgagcacgacaaagcctacgaccagcagctcaaagcgggtgacaatccgtacctgcggtataatcacgccgacgccgagtttcaggagcgtctgcaagaagatacgtcttttgggggcaacctcgggcgagcagtcttccaggccaagaagcgggttctcgaacctctcggtctggttgaggaaggcgctaagacggctcctggaaagaagagaccggtagagcagtcgccacaagagccagactcctcctcgggcatcggcaagacaggccagcagcccgctaaaaagagactcaattttggtcagactggcgactcagagtcagtccccgacccacaacctctcggagaacctccagcagccccctcaggtctgggacctaatacaatggcttcaggcggtggcgctccaatggcagacaataacgaaggcgccgacggagtgggtaattcctcgggaaattggcattgcgattccacatggctgggggacagagtcatcaccaccagcacccgaacctgggccctgcccacctacaacaaccacctctacaagcaaatctccaacggcacctcgggaggaagcaccaacgacaacacctattttggctacagcaccccctgggggtattttgacttcaacagattccactgtcacttttcaccacgtgactggcaacgactcatcaacaacaattggggattccggcccaaaagactcaacttcaagctgttcaacatccaggtcaaggaagtcacgacgaacgaaggcaccaagaccatcgccaataatctcaccagcaccgtgcgggtctttacggactcggagtaccagttaccgtacgtgctaggatccgctcaccagggatgtctgcctccgttcccggcggacgtcttcatggttcctcagtacggctatttaactttaaacaatggaagccaagccctgggacgttcctccttctactgtctggagtatttcccatcgcagatgctgagaaccggcaacaactttcagttcagctacaccttcgaggacgtgcctttccacagcagctacgcgcacagccagagcctggacaggctgatgaatcccctcatcgaccagtacctgtactacctggtcagaacgcaaacgactggaactggagggacgcagactctggcattcagccaagcgggtcctagctcaatggccaaccaggctagaaattgggtgcccggaccttgctaccggcagcagcgcgtctccacgacaaccaaccagagcaacaacagcaactttgcctggacgggagctgccaagtttaagctgaacggccgagactctctaatgaatccgggcgtggcaatggcttcccacaaggatgacgacgaccgcttcttcccttcgagcggggtcctgatttttggcaagcaaggagccgggaacgatggagtggattacagccaagtgctgattacagatgaggaagaaatcaaggctaccaaccccgtggccacagaagaatatggagcagtggccatcaacaaccaggccgccaatacgcaggcgcagaccggactcgtgcacaaccagggggtgattcccggcatggtgtggcagaatagagacgtgtacctgcagggtcccatctgggccaaaattcctcacacggacggcaactttcacccgtctcccctgatgggcggctttggactgaagcacccgcctcctcaaattctcatcaagaacacaccggttccagcggacccgccgcttaccttcaaccaggccaagctgaactctttcatcacgcagtacagcaccggacaggtcagcgtggaaatcgagtgggagctgcagaaagaaaacagcaaacgctggaatccagagattcaatacacttccaactactacaaatctacaaatgtggactttgctgtcaacacggaaggagtttatagcgagcctcgccccattggcacccgttacctcacccgcaacctgtaattacatgttaatcaataaaccggttaattcgtttcagttgaactttggtctctgcgaagggcgaattc

SEQ ID NO: 101 - protein, 736 aa, Adeno-associated virus
MAADGYLPDWLEDNLSEGIREWWDLKPGAPKPKANQQKQDDGRGLVLPGYKYLGPFNGLDKGEPVNAADAAALEHDKAYDQQLKAGDNPYLRYNHADAEFQERLQEDTSFGGNLGRAVFQAKKRVLEPLGLVEEGAKTAPGKKRPVEQSPQEPDSSSGIGKTGQQPAKKRLNFGQTGDSESVPDPQPLGEPPAAPSGLGPNTMASGGGAPMADNNEGADGVGNSSGNWHCDSTWLGDRVITTSTRTWALPTYNNHLYKQISNGTSGGSTNDNTYFGYSTPWGYFDFNRFHCHFSPRDWQRLINNNWGFRPKRLNFKLFNIQVKEVTTNEGTKTIANNLTSTVRVFTDSEYQLPYVLGSAHQGCLPPFPADVFMVPQYGYLTLNNGSQALGRSSFYCLEYFPSQMLRTGNNFQFSYTFEDVPFHSSYAHSQSLDRLMNPLIDQYLYYLVRTQTTGTGGTQTLAFSQAGPSSMANQARNWVPGPCYRQQRVSTTTNQSNNSNFAWTGAAKFKLNGRDSLMNPGVAMASHKDDDDRFFPSSGVLIFGKQGAGNDGVDYSQVLITDEEEIKATNPVATEEYGAVAINNQAANTQAQTGLVHNQGVIPGMVWQNRDVYLQGPIWAKIPHTDGNFHPSPLMGGFGLKHPPPQILIKNTPVPADPPLTFNQAKLNSFITQYSTGQVSVEIEWELQKENSKRWNPEIQYTSNYYKSTNVDFAVNTEGVYSEPRPIGTRYLTRNL

SEQ ID NO: 102 - DNA, 3121 bp, Adeno-associated virus
gaattcgcccttctacggctgcgtcaactggaccaatgagaactttcccttcaacgattgcgtcgacaagatggtgatctggtgggaggagggcaagatgacggccaaggtcgtggagtccgccaaggccattctcggcggcagcaaggtgcgtgtggaccaaaagtgcaagtcttccgcccagatcgatcccacccccgtgatcgtcacctccaacaccaacatgtgcgccgtgattgacgggaacagcaccaccttcgagcaccagcagccgttgcaggaccggatgttcaaatttgaactcacccgccgtctggagcatgactttggcaaggtgacgaagcaggaagtcaaagagttcttccgctgggcgcaggatcacgtgaccgaggtggcgcatgagttccacgtcagaaagggtggcgccaacaagagacccgcccccgatgacgcggatataagcgagcccaagcgggcctgcccctcagtcgcggatccatcgacgtcagacgcggaaggagctccggtggactttgccgacaggtaccaaaacaaatgttctcgtcacgcgggcatgcttcagatgctgtttccctgcaagacatgcgagagaatgaatcagaatttcaacatttgcttcacgcacgggaccagagactgttcagaatgtttccccggcgtgtcagaatctcaaccggtcgtcagaaagaggacgtatcggaaactctgtgcgattcatcatctgctggggcgggctcccgagattgcttgctcggcctgcgatctggtcaacgtggacctggatgactgtgtttctgagcaataaatgacttaaaccaggtatggctgccgatggttatcttccagattggctcgaggacaacctctctgagggcattcgcgagtggtgggacttgaaacctggagccccgaaacccaaagccaaccagcaaaagcaggacgacggccggggtctggtgcttcctggctacaagtacctcggacccttcaacggactcgacaagggggagcccgtcaacgcggcggacgcagcggccctcgagcacgacaaagcctacgaccagcagctcaaagcgggtgacaatccgtacctgcggtataatcacgccgacgccgagtttcaggagcgtctgcaagaagatacgtcctttgggggcaacctcgggcgagcagtcttccaggccaagaagcgggttctcgaacctctcggtctggttgaggaaggcgctaagacggctcctggaaagaagagaccggtagagcagtcgccacaagagccagactcctcctcgggcatcggcaagacaggccagcagcccgctaaaaagagactcaattttggtcagactggcgactcagagtcagtccccgacccacaacctctcggagaacctccagcagccccctcaggtctgggacctaatacaatggcttcaggcggtggcgctccaatggcagacaataacgaaggcgccgacggagtgggtaattcctcgggaaattggcattgcgattccacatggctgggggacagagtcatcaccaccagcacccgaacctgggccctgcccacctacaacaaccacctctacaagcaaatctccaacggcacctcgggaggaagcaccaacgacaacacctattttggctacagcaccccctgggggtattttgacttcaacagattccactgtcacttttcaccacgtgactggcaacgactcatcaacaacaattggggattccggcccaaaagactcaacttcaagctgttcaacatccaggtcaaggaagtcacgacgaacgaaggcaccaagaccatcgccaataatctcaccagcaccgtgcaggtctttacggacttggagtaccagttaccgtacgtgctaggatccgctcaccagggatgtctgcctccgttcccggcggacgtcttcatggttcctcagtacggctatttaactttaaacaatggaagccaagccctgggacgttcctccttctactgtctggagtatttcccatcgcagatgccgagaaccggcaacaactttcagttcagctacaccttcgaggacgtgcctttccacagcagctacgcgcacagccagagcctggacaggctgatgaatcccctcatcgaccagtacctgtactacctggtcagaacgcaaacgactggaactggagggacgcagactctggcattcagccaagcgggtcctagctcaatggccaaccaggctagaaattgggtgcccggaccttgctaccggcagcagcgcgtctccacgacaaccaaccagaacaacaacagcaactttgcctggacgggagctgccaagtttaagctgaacggccgagactctctaatgaatccgggcgtggcaatggcttcccacaaggatgacgacgaccgcttcttcccttcgagcggggtcctgatttttggcaagcaaggagccgggaacgatggagtggattacagccaagtgctgattacagatgaggaagaaatcaaggctaccaaccccgtggccacagaagaatatggagcagtggccatcaacaaccaggccgccaatacgcaggcgcagaccggactcgtgcacaaccagggggtgattcccggcatggtgtggcagaatagagacgtgtacctgcagggtcccatctgggccaaaattcctcacacggacggcaactttcacccgtctcccctgatgggcggctttggactgaagcacccgcctcctcaaattctcatcaagaacacaccggttccagcggacccgccgcttaccttcaaccaggccaagctgaactctttcatcacgcagtacagcaccggacaggtcagcgtggaaatcgagtgggagctgcagaaagaaaacagcaaacgctggaatccagagattcaatacacttccaactactacaaatctacaaatgtggactttgctgtcaacacggaaggagtttatagcgagcctcgccccattggcacccgttacctcacccgcaacctgtaattacatgttaatcaataaaccggttaattcgtttcagttgaactttggtctctgcgaagggcgaattc

SEQ ID NO: 103 - protein, 736 aa, Adeno-associated virus
MAADGYLPDWLEDNLSEGIREWWDLKPGAPKPKANQQKQDDGRGLVLPGYKYLGPFNGLDKGEPVNAADAAALEHDKAYDQQLKAGDNPYLRYNHADAEFQERLQEDTSFGGNLGRAVFQAKKRVLEPLGLVEEGAKTAPGKKRPVEQSPQEPDSSSGIGKTGQQPAKKRLNFGQTGDSESVPDPQPLGEPPAAPSGLGPNTMASGGGAPMADNNEGADGVGNSSGNWHCDSTWLGDRVITTSTRTWALPTYNNHLYKQISNGTSGGSTNDNTYFGYSTPWGYFDFNRFHCHFSPRDWQRLINNNWGFRPKRLNFKLFNIQVKEVTTNEGTKTIANNLTSTVQVFTDLEYQLPYVLGSAHQGCLPPFPADVFMVPQYGYLTLNNGSQALGRSSFYCLEYFPSQMPRTGNNFQFSYTFEDVPFHSSYAHSQSLDRLMNPLIDQYLYYLVRTQTTGTGGTQTLAFSQAGPSSMANQARNWVPGPCYRQQRVSTTTNQNNNSNFAWTGAAKFKLNGRDSLMNPGVAMASHKDDDDRFFPSSGVLIFGKQGAGNDGVDYSQVLITDEEEIKATNPVATEEYGAVAINNQAANTQAQTGLVHNQGVIPGMVWQNRDVYLQGPIWAKIPHTDGNFHPSPLMGGFGLKHPPPQILIKNTPVPADPPLTFNQAKLNSFITQYSTGQVSVEIEWELQKENSKRWNPEIQYTSNYYKSTNVDFAVNTEGVYSEPRPIGTRYLTRNL

SEQ ID NO: 104 - DNA, 3122 bp, Adeno-associated virus
gaattcgccctttctacggctgcgtcaactggaccaatgagaactttcccttcaacgattgcgtcgacaagatggtgatctggtgggaggagggcaagatgacggccaaggtcgtggagtccgccaaggccattctcggcggcagcaaggtgcgtgtggaccaaaagtgcaagtcttccgcccagatcgatcccacccccgtgatcgtcacctccaacaccaacatgtgcgccgtgattgacgggaacagcaccaccttcgagcaccagcagccgttgcaggaccggatgttcaaatttgaactcacccgccgtctggagcatgactttggcaaggtgacgaagcaggaagtcaaagggttcttccgctgggcgcaggatcacgtgaccgaggtggcgcatgagttccacgtgcgagcccaagcgggcctgcccctcagtcgcggatccatcgacgtcagaccagaaagggtggagccaacaagagacccgcccccgatgacgcggatataagcggaaggagctccggtggactttgccgacaggtaccaaaacaaatgttctcgtcacgcgggcatgcttcagatgctgtttccctgcaagacatgcgagagaatgaatcagaatttcaacatttgcttcacgcacgggaccagagactgttcagaatgtttccccggcgtgtcagaatctcaaccggtcgtcagaaagaggacgtatcggaaactctgtgcgattcatcatctgctggggcgggctcccgagattgcttgctcggcctgcgatctggtcaacgtggacctggatgactgtgtttctgagcaataaatgacttaaaccaggtatggctgccgatggttatcttccagattggctcgaggacaacctctctgagggcattcgcgagtggtgggacttgaaacctggagccccgaaacccaaagccaaccagcaaaagcaggacgacggccggggtctggtgcttcctggctacaagtacctcggacccttcaacggactcgacaagggggagcccgtcaacgcggcggacgcagcggccctcgagcacgacaaagcctacgaccagcagctcaaagcgggtgacaatccgtacctgcggtataatcacgccgacgccgagtttcaggagcgtctgcaagaagatacgtcttttgggggcaacctcgggcgagcagtcttccaggccaagaagcgggttctcgaacctctcggtctggttgaggaaggcgctaagacggctcctggaaagaagagaccggtagagcagtcgccacaagagccagactcctcctcgggcatcggcaagacaggccagcagcccgctaaaaagagactcaattttggtcagactggcgactcagagtcagtccccgacccacaacctctcggagaacctccagcagccccctcaggtctgggacctaatacaatggcttcaggcggtggcgctccaatggcagacaataacgaaggcgccgacggagtgggtaattcctcgggaaattggcattgcgattccacatggctgggggacagagtcatcaccaccagcacccgaacctgggccctgcccacctacaacaaccacctctacaagcaaatctccaacggcacctcgggaggaagcaccaacgacaacacctattttggctacagcaccccctgggggtattttgacttcaacagattccactgtcacttttcaccacgtgactggcaacgactcatcaacaacaattggggattccggcccaaaagactcaacttcaagctgttcaacatccaggtcaaggaagtcacgacgaacgaaggcaccaagaccatcgccaataatctcaccagcaccgtgcaggtctttacggactcggagtaccagttaccgtacgtgctaggatccgctcaccagggatgtctgcctccgttcccggcggacgtcttcatggttcctcagtacggctatttaactttaaacaatggaagccaagccctgggacgttcctccttctactgtctggagtatttcccatcgcagatgctgagaaccggcaacaactttcagttcagctacaccttcgaggacgtgcctttccacagcagctacgcgcacagccagagcctggacaggctgatgaatcccctcatcgaccagtacctgtactacctggtcagaacgcaaacgactggaactggagggacgcagactctggcattcagccaagcgggtcctagctcaatggccaaccaggctagaaattgggtgcccggaccttgctaccggcagcagcgcgtctccacgacaaccaaccagaacaacaacagcaactttgcctggacgggagctgccaagtttaagctgaacggccgagactctctaatgaatccgggcgtggcaatggcttcccacaaggatgacgacgaccgcttcttcccttcgagcggggtcctgatttttggcaagcaaggagccgggaacgatggagtggattacagccaagtgctgattacagatgaggaagaaatcaaggctaccaaccccgtggccacagaagaatatggagcagtggccatcaacaaccaggccgccaatacgcaggcgcagaccggactcgtgcacaaccagggggtgattcccggcatggtgtggcagaatagagacgtgtacctgcagggtcccatctgggccaaaattcctcacacggacggcaactttcacccgtctcccctgatgggcggctttggactgaagcacccgcctcctcaaattctcatcaagaacacaccggttccagcggacccgccgcttaccttcaaccaggccaagctgaactctttcatcacgcagtacagcaccggacaggtcagcgtggaaatcgagtgggagctgcagaaagaaaacagcaaacgctggaatccagagattcaatacacttccaactactacaaatctacaaatgtggactttgctgtcaacacggagggggtttatagcgagcctcgccccattggcacccgttacctcacccgcaacctgtaattacatgttaatcaataaaccggttaattcgtttcagttgaactttggtctctgcgaagggcgaattc

SEQ ID NO: 105 - protein, 736 aa, Adeno-associated virus
MAADGYLPDWLEDNLSEGIREWWDLKPGAPKPKANQQKQDDGRGLVLPGYKYLGPFNGLDKGEPVNAADAAALEHDKAYDQQLKAGDNPYLRYNHADAEFQERLQEDTSFGGNLGRAVFQAKKRVLEPLGLVEEGAKTAPGKKRPVEQSPQEPDSSSGIGKTGQQPAKKRLNFGQTGDSESVPDPQPLGEPPAAPSGLGPNTMASGGGAPMADNNEGADGVGNSSGNWHCDSTWLGDRVITTSTRTWALPTYNNHLYKQISNGTSGGSTNDNTYFGYSTPWGYFDFNRFHCHFSPRDWQRLINNNWGFRPKRLNFKLFNIQVKEVTTNEGTKTIANNLTSTVQVFTDSEYQLPYVLGSAHQGCLPPFPADVFMVPQYGYLTLNNGSQALGRSSFYCLEYFPSQMLRTGNNFQFSYTFEDVPFHSSYAHSQSLDRLMNPLIDQYLYYLVRTQTTGTGGTQTLAFSQAGPSSMANQARNWVPGPCYRQQRVSTTTNQNNNSNFAWTGAAKFKLNGRDSLMNPGVAMASHKDDDDRFFPSSGVLIFGKQGAGNDGVDYSQVLITDEEEIKATNPVATEEYGAVAINNQAANTQAQTGLVHNQGVIPGMVWQNRDVYLQGPIWAKIPHTDGNFHPSPLMGGFGLKHPPPQILIKNTPVPADPPLTFNQAKLNSFITQYSTGQVSVEIEWELQKENSKRWNPEIQYTSNYYKSTNVDFAVNTEGVYSEPRPIGTRYLTRNL

SEQ ID NO: 106 - DNA, 2370 bp, Adeno-associated virus
gaattcgccctttctacggctgcgtcaactggaccaatgagaactttcccttcaacgattgcgtcgacaagatggtgatctggtgggaggagggcaagatgacggccaaggtcgtggagtccgccaaggccattctcggcggcagcaaggtgcgcgtggaccaaaagtgcaagtcgtccgcccagatcgaccccacccccgtgatcgtcacctccaacaccaacatgtgcgccgtgattgacgggaacagcaccaccttcgagcaccagcagccgttgcaggaccggatgttcaagttcgaactcacccgccgtctggagcacgactttggcaaggtgaccaagcaggaagtcaaagagttcttccgctgggcgcaggatcacgtgaccgaggtggcgcatgagttctacgtcagaaagggcggagccagcaaaagacccgcccccgatgacgcggatataagcgagcccaagcgggcctgcccctcagtcgcggatccatcgacgtcagacgcggaaggagctccggtggactttgccgacaggtaccaaaacaaatgttctcgtcacgcgggcatgcttcagacgctgtttccctgcaaaacgtgcgagagaatgaatcagaatttcaacatttgcttcacgcacggggtcagagactgctcagaatgtttccccggtgcatcagaatctcaaccggtcgtcagaaaaaaaacgtatcagaaactgtgtgccattcatcatctgctggggcgggcacccgagattgcttgctcggcctgcgatctggtcaacgtggacctggacgactgtgtttctgagcaataaatgacttaaaccaggtatggctgccgatggttatcttccagattggcttgaggacaacctctctgagggcattcgcgagtggtgggacctgaaacctggagccccgaaacccaaagccaaccagcaaaagcaggacgacggccggggtctggtgcttcctggctacaagtacctcggacccttcaacggactcgacaagggggagcccgtcaacgcggcggacgcagcggccctcgagcacgacaaggcctacgaccagcagctcaaagcgggtgacaatccgtacctgcggtataaccacgccgacgccgagtttcaggagcgtctgcaagaagatacgtcttttgggggcaacctcgggcgagcagtcttccaggccaagaagcgggttctcgaacctctcggtctggttgaggaaggcgctaagacggctcctggaaagaagagaccggtagagccatcacctcagcgttcccccgactcctccacgggcatcggcaagaaaggccaccagcccgcgagaaagagactgaactttgggcagactggcgactcggagtcagtccccgaccctcaaccaatcggagaaccaccagcaggcccctctggtctgggatctggtacaatggctgcaggcggtggcgctccaatggcagacaataacgaaggcgccgacggagtgggtagttcctcaggaaattggcattgcgattccacatggctgggcgacagagtcatcaccaccagcacccgaacctgggccctgcccacctacaacaaccatctctacaagcaaatctccaacgggacatcgggaggaagcactaacgacaacacctactttggctacagcaccccctgggggtattttgacttcaacagattccactgccacttctcaccacgtgactggcagcgactcatcaacaataactggggattccggcccaagagactcaacttcaagctcttcaacatccaggtcaaggaggtcacgcagaatgaaggcaccaagaccatcgccaataaccttaccagcacgattcaggtgtttacggactcggaataccagctcccgtacgtcctcggctctgcgcaccagggctgcctccctccgttcccggcggacgtcttcatgattcctcagtacgggtatctgaccctaaacaatggcagtcaggctgtgggccgttcctccttctactgcctggaatacttcccttctcaaatgctgaggacgggcaacaactttgaattcagctacaccttcgaggacgtgcctttccacagcagctacgcgcacagccagagcctggaccggctgatgaaccctctcatcgaccagtacctgtattacttatccagaactcagtccacaggaggaactcaaggtactcagcaattgttattttctcaagccgggcccgcaaacatgtyggctcaggccaagaactggctacctggaccgtgttaccgtcagcaacgagtttccacgacactgtcgcaaaacaacaacagcaattttgctggaccggtgccacca

SEQ ID NO: 107 - protein, 738 aa, Adeno-associated virus; identical to SEQ ID NO: 97

SEQ ID NO: 108 - DNA, 2205 bp, Adeno-associated virus
atgactgacggttaccttccagattggctagaggacaacctctctgaaggcgttcgagagtggtgggcgctgcaacctggagcccctaaacccaaggcaaatcaacaacatcaggacaacgctcggggtcttgtgcttccgggttacaaatacctcggacccggcaacggactcgacaagggggaacccgtcaacgcagcggacgcggcagccctcgagcacgacaaggcctacgaccagcagctcaaggccggtgacaacccctacctcaagtacaaccacgccgacgcggagttccagcagcggcttcagggcgacacatcgtttgggggcaacctcggcagagcagtcttccaggccaaaaagagggttcttgaacctcttggtctggttgagcaagcgggtgagacggctcctggaaagaagagaccgttgattgaatccccccagcagcccgactcctccacgggtatcggcaaaaaaggcaagcagccggctaaaaagaagctcgttttcgaagacgaaactggagcaggcgacggaccccctgagggatcaacttccggagccatgtctgatgacagtgagatgcgtgcagcagctggcggagctgcagtcgagggcggacaaggtgccgatggagtgggtaatgcctcgggtgattggcattgcgattccacctggtctgagggccacgtcacgaccaccagcaccagaacctgggtcttgcccacctacaacaaccacctctacaagcgactcggagagagcctgcagtccaacacctacaacggattctccaccccctggggatactttgacttcaaccgcttccactgccacttctcaccacgtgactggcagcgactcatcaacaacaactggggcatgcgacccaaagccatgcgggtcaaaatcttcaacatccaggtcaaggaggtcacgacgtcgaacggcgagacaacggtggctaataaccttaccagcacggttcagatctttgcggactcgtcgtacgaactgccgtacgtgatggatgcgggtcaagagggcagcctgcctccttttcccaacgacgtctttatggtgccccagtacggctactgtggactggtgaccggcaacacttcgcagcaacagactgacagaaatgccttctactgcctggagtactttccttcgcagatgctgcggactggcaacaactttgaaattacgtacagttttgagaaggtgcctttccactcgatgtacgcgcacagccagagcctggaccggctgatgaaccctctcatcgaccagtacctgtggggactgcaatcgaccaccaccggaaccaccctgaatgccgggactgccaccaccaactttaccaagctgcggcctaccaacttttccaactttaaaaagaactggctgcccgggccttcaatcaagcagcagggcttctcaaagactgccaatcaaaactacaagatccctgccaccgggtcagacagtctcatcaaatacgagacgcacagcactctggacggaagatggagtgccctgacccccggacctccaatggccacggctggacctgcggacagcaagttcagcaacagccagctcatctttgcggggcctaaacagaacggcaacacggccaccgtacccgggactctgatcttcacctctgaggaggagctggcagccaccaacgccaccgatacggacatgtggggcaacctacctggcggtgaccagagcaacagcaacctgccgaccgtggacagactgacagccttgggagccgtgcctggaatggtctggcaaaacagagacatttactaccagggtcccatttgggccaagattcctcataccgatggacactttcacccctcaccgctgattggtgggtttgggctgaaacacccgcctcctcaaatttttatcaagaacaccccggtacctgcgaatcctgcaacgaccttcagctctactccggtaaactccttcattactcagtacagcactggccaggtgtcggtgcagattgactgggagatccagaaggagcggtccaaacgctggaaccccgaggtccagtttacctccaactacggacagcaaaactctctgttgtgggctcccgatgcggctgggaaatacactgagcctagggctatcggtacccgctacctcacccaccacctgtaa

SEQ ID NO: 109 - protein, 734 aa, Adeno-associated virus; identical to SEQ ID NO: 81

SEQ ID NO: 110 - DNA, 3128 bp, Adeno-associated virus
gaattcgccctttctacggctgcgtcaactggaccaatgagaactttcccttcaacgattgcgtcgacaagatgttgatctggtgggaggagggcaagatgacggccaaggtcgtggagtccgccaaggccattctcggcggcagcaaagtgcgcgtggaccaaaagtgcaagccgtccgcccagatcgaccccacccccgtgatcgtcacctccaacaccaacatgtgcgccgtgattgacgggaacagcaccaccttcgagcaccagcagccgttgcgggaccggatgttcaagtttgaactcacccgccgtctggagcacgactttggcaaggtgacaaagcaggaagtcagagagttcttccgctgggcgcaggatcacgtgaccgaggtggcgcacgagttctacgtcagaaagggtggagccaacaagagacccgcccccgatgacgcggataaaagcgagcccaagcgggcctgcccctcagtcgcggatccatcgacgtcagacgcggaaggagctccggtggactttgccgacaggtaccaaaacaaatgttctcgtcacgcgggcatgcttcagatgctgtttccctgcaaaacatgcgagagaatgaatcagaatttcaacatttgcttcacgcacgggaccagagactgttcagaatgtttccccggcgtgtcagaatctcaaccggtcgtcagaaaaaagacgtatcggaaactctgtgcgattcatcatctgctggggcgggcacccgagattgcttgctcggcctgcgatctggtcaacgtggacctagatgactgtgtttctgagcaataaatgacttaaaccaggtatggctgccgatggttatcttccagattggctcgaggacaacctctctgagggcattcgcgagtggtgggacttgaaacctggagccccgaaacccaaagccaaccagcaaaagcaggacgacggccggggtctggtgcttcctggctacaagtacctcggacccttcaacggactcgacaagggggagcccgtcaacgcggcggacgcagcggccctcgagcacgacaaggcctacgaccagcagctcaaagcgggtgacaatccgtacctgcggtataaccacgccgacgccgagtttcaggagcgtctgcaagaagatacgtcttttgggggcaacctcgggcgagcagtcttccaggccaagaagcgggttctcgaacctctcggtctggttgaggaaggcgctaagacggctcctggaaagaagagaccggtagagccatcaccccagcgttctccagactcctctacgggcatcggcaagaaaggccagcagcccgcgaaaaagagactcaactttgggcagactggcgactcagagtcagtgcccgaccctcaaccaatcggagaaccccccgcaggcccctctggtctgggatctggtacaatggctgcaggcggtggcgctccaatggcagacaataacgaaggcgccgacggagtgggtagttcctcaggaaattggcattgcgattccacatggctgggcgacagagtcatcaccaccagcacccgaacctgggccctccccacctacaacaaccacctctacaagcaaatctccaacgggacttcgggaggaagcaccaacgacaacacctacttcggctacagcaccccctgggggtattttgactttaacagattccactgccacttctcaccacgtgactggcagcgactcatcaacaacaactggggattccggcccaagagactcaacttcaagctcttcaacatccaggtcaaggaggtcacgcagaatgaaggcaccaagaccatcgccaataaccttaccagcacgattcaggtctttacggactcggaataccagctcccgtacgtcctcggctctgcgcaccagggctgcctgcctccgttcccggcggacgtcttcatgattcctcagtacgggtacctgactctgaacaatggcagtcaggccgtgggccgttcctccttctactgcctggagtactttccttctcaaatgctgagaacgggcaacaactttgagttcagctaccagtttgaggacgtgccttttcacagcagctacgcgcacagccaaagcctggaccggctgatgaaccccctcatcgaccagtacctgtactacctgtctcggactcagtccacgggaggtaccgcaggaactcagcagttgctattttctcaggccgggcctaataacatgtcggctcaggccaaaaactggctacccgggccctgctaccggcagcaacgcgtctccacgacactgtcgcaaaataacaacagcaactgtaaatcccggtgtcgctatggcaacccacaaggacgacgaagagcgattttgcctggaccggtgccaccaagtatcatctgaatggcagagactctctgttttccgtccagcggagtcttaatgtttgggaaacagggagctggaaaagacaacgtggactatagcagcgttatgctaaccagtgaggaagaaattaaaaccaccaacccagtggccacggaacagtacggcgtggtggccgataacctgcaacagcaaaacgccgctcctattgtaggggccgtcaacagtcaaggagccttacctggcatggtctggcagaaccgggacgtgtacctgcagggtcctatctgggccaagattcctcacacggacggaaactttcatccctcgccgctgatgggaggctttggactgaaacacccgcctcctcagatcctgattaagaatacacctgttcccgcggatcctccaactaccttcagtcaagctaagctggcgtcgttcatcacgcagtacagcaccggacaggtcagcgtggaaattgaatgggagctgcagaaagaaaacagcaaacgctggaacccagagattcaatacacttccaactactacaaatctacaaatgtggacttcgctgttaacacagatggcacttattctgagcctcgccccattggcacccgttacctcacccgtaatctgtaattgctcgttaatcaataaaccggttgattcgtttcagttgaactttggtctctgcgaagggcgaattc

SEQ ID NO: 111 - protein, 738 aa, Adeno-associated virus; identical to SEQ ID NO: 31

SEQ ID NO: 112 - DNA, 3128 bp, Adeno-associated virus
gaattcgccctttctacggctgcgtcaactggaccaatgagaactttcccttcaacgattgcgtcgacaagatggtgatctggtgggaggagggcaagatgacggccaaggtcgtggagtccgccaaggccattctcggcggcagcaaagtgcgcgtggaccaaaagtgcaagtcgtccgcccagatcgaccccacccccgtgatcgtcacctccaacaccaacatgtgcgccgtgattgacgggaacagcaccaccttcgagcaccagcagccgttgcaggaccggatgttcaagtttgaactcacccgccgtctggagcacgactttggcaaggtgacaaagcaggaagtcagagagttcttccgctgggcgcaggatcacgtgaccgaggtggcgcacgagttctacgtcagaaagggtggagccaacaagagacccgcccccgatgacgcggataaaagcgagcccaagcgggcctgcccctcagtcgcggatccatcgacgtcagacgcggaaggagctccggtggactttgccgacaggtaccaaaacaaatgttctcgtcacgcgggcatgcttcagatgctgtttccctgcaaaacatgcgagagaatgaatcagaatttcaacatttgcttcacgcacgggaccagagactgttcagaatgtttccccggcgtgtcagaatctcaaccggttgtcagaaaaaagacgtatcggaaactctgtgcgattcatcatctgctggggcgggcacccgagattgcttgctcggcctgcgatctggtcaacgtggacctagatgactgtgtttctgagcaataaatgacttaaaccaggtatggctgccgatggttatcttccagattggctcgaggacaacctctctgagggcattcgcgagtggtgggacttgaaacctggagccccgaaacccaaagccaaccagcaaaagcaggacgacggccggggtctggtgcttcctggctacaagtacctcggacccttcaacggactcgacaagggggagcccgtcaacgcggcggacgcagcggccctcgagcacgacaaggcctacgaccagcagctcaaagcgggtgacaatccgtacctgcggtataaccacgccgacgccgagtttcaggagcgtctgcaagaagatacgtcttttgggggcaacctcgggcgagcagtcttccaggccaagaagcgggttctcgaacctctcggtctggttgaggaaggcgctaagacggctcctggaaagaagagaccggtagagccatcaccccagcgttctccagactcctctacgggcatcggcaagaaaggccagcagcccgcgaaaaagagactcaactttgggcagactggcgactcagagtcagtgcccgaccctcaaccaatcggagaaccccccgcaggcccctctggtctgggatctggtacaatggctgcaggcggtggcgctccaatggcagacaataacgaaggcgccgacggagtgggtagttcctcaggaaattggcattgcgattccacatggctgggcgacagagtcatcaccaccagcacccgaacctgggccctccccacctacaacaaccacctctacaagcaaatctccaacgggacttcgggaggaagcaccaacgacaacacctacttcggctacagcaccccctgggggtattttgactttaacagattccactgccacttctcaccacgtgactggcagcgactcatcaacaacaactggggattccggcccaagagacccaacttcaagctcttcaacatccaggtcaaggaggtcacgcagaatgaaggcaccaagaccatcgccaataaccttaccagcacgattcaggtctttacggactcggaataccagctcccgtacgtcctcggctctgcgcaccagggctgcctgcctccgttcccggcggacgtcttcatgattcctcagtacgggtacctgactctgaacaatggcagtcaggccgtgggccgttcctccttctactgcctggagtactttccttctcaaatgctgagaacgggcaacaactttgagttcagctaccagtttgaggacgtgccttttcacagcagctacgcgcacagccaaagcctggaccggctgatgaaccccctcatcgaccagtacctgtactacctgtctcggactcagtccacgggaggtaccgcaggaactcagcagttgctattttctcaggccgggcctaataacatgtcggctcaggccaaaaactggctacccgggccctgctaccggcagcaacgcgtctccacgacactgtcgcaaaataacaacagcaactttgcctggaccggtgccaccaagtatcatctgaatggcagagactctctggtaaatcccggtgtcgctatggcaacccacaaggacgacgaagagcgattttttccgtccagcggagtcttaatgtttgggaaacagggagctggaaaagacaacgtggactatagcagcgttatgctaaccagtgaggaagaaattaaaaccaccaacccagtggccacagaacagtacggcgtggtggccgataacctgcaacagcaaaacgccgctcctattgtaggggccgtcaacagtcaaggagccttacctggcatggtctggcagaaccgggacgtgtacctgcagggtcctatctgggccaagattcctcacacggacggaaactttcatccctcgccgctgatgggaggctttggactgaaacacccgcctcctcagatcctgattaagaatacacctgttcccgcggatcctccaactaccttcagtcaagctaagctggcgtcgttcatcacgcagtacagcaccggacaggtcagcgtggaaattgaatgggagctgcagaaagaaaacagcaaacgctggaacccagagattcaatacacttccaactactacaaatctacaaatgtggactttgctgttaacacagatggcacttattctgagcctcgccccattggcacccgttacctcacccgtaatctgtaattgcttgttaatcaataaaccggttgattcgtttcagttgaactttggtctctgcgaagggcgaattc

SEQ ID NO: 113 - protein, 738 aa, Adeno-associated virus
MAADGYLPDWLEDNLSEGIREWWDLKPGAPKPKANQQKQDDGRGLVLPGYKYLGPFNGLDKGEPVNAADAAALEHDKAYDQQLKAGDNPYLRYNHADAEFQERLQEDTSFGGNLGRAVFQAKKRVLEPLGLVEEGAKTAPGKKRPVEPSPQRSPDSSTGIGKKGQQPAKKRLNFGQTGDSESVPDPQPIGEPPAGPSGLGSGTMAAGGGAPMADNNEGADGVGSSSGNWHCDSTWLGDRVITTSTRTWALPTYNNHLYKQISNGTSGGSTNDNTYFGYSTPWGYFDFNRFHCHFSPRDWQRLINNNWGFRPKRPNFKLFNIQVKEVTQNEGTKTIANNLTSTIQVFTDSEYQLPYVLGSAHQGCLPPFPADVFMIPQYGYLTLNNGSQAVGRSSFYCLEYFPSQMLRTGNNFEFSYQFEDVPFHSSYAHSQSLDRLMNPLIDQYLYYLSRTQSTGGTAGTQQLLFSQAGPNNMSAQAKNWLPGPCYRQQRVSTTLSQNNNSNFAWTGATKYHLNGRDSLVNPGVAMATHKDDEERFFPSSGVLMFGKQGAGKDNVDYSSVMLTSEEEIKTTNPVATEQYGVVADNLQQQNAAPIVGAVNSQGALPGMVWQNRDVYLQGPIWAKIPHTDGNFHPSPLMGGFGLKHPPPQILIKNTPVPADPPTTFSQAKLASFITQYSTGQVSVEIEWELQKENSKRWNPEIQYTSNYYKSTNVDFAVNTDGTYSEPRPIGTRYLTRNL

SEQ ID NO: 114 - protein, 738 aa, Adeno-associated virus
MAADGYLPDWLEDNLSEGIREWWDLKPGAPKPKANQQKQDDGRGLVLPGYKYLGPFNGLDKGEPVNAADAAALEHDKAYDQQLKAGDNPYLRYNHADAEFQERLQEDTSFGGNLGRAVFQAKKRVLEPLGLVEEAAKTAPGKKRPVEPSPQRSPDSSTGIGKKGQQPAKKRLNFGQTGDSESVPDPQPIGEPPAGPSGLGSGTMAAGGGAPMADNNEGADGVGSSSGNWHCDSTWLGDRVITTSTRTWALPTYNNHLYKQISNGTSGGSTNDNTYFGYSTPWGYFDFNRFHCHFSPRDWQRLINNNWGFRPKRLSFKLFNIQVKEVTQNEGTKTIANNLTSTIQVFTDSEYQLPYVLGSAHQGCLPPFPADVFMIPQYGYLTLNNGSQAVGRSSFYCLEYFPSQMLRTGNNFEFSYTFEDVPFHSSYAHSQSLDRLMNPLIDQYLYYLSRTQSTGGTQGTQQLLFSQAGPANMSAQAKNWLPGPCYRQQRVSTTLSQNNNSNFAWTGATKYHLNGRDSLVNPGVAMATHKDDEERFFPSSGVLMFGKQGAGRDNVDYSSVMLTSEEEIKTTNPVATEQYGVVADNLQQTNTGPIVGNVNSQGALPGMVWQNRDVYLQGPIWAKIPHTDGNFHPSPLMGGFGLKHPPPQILIKNTPVPADPPTTFSQAKLASFITQYSTGQVSVEIEWELQKENSKRWNPEIQYTSNYYKSTNVDFAVNTEGTYSEPRPIGTRYLTRNL

SEQ ID NO: 115 - DNA, 2172 bp, Artificial Sequence
  Description of Artificial Sequence: Synthetic polynucleotide
atgtcttttgttgatcaccctccagattggttggaagaagttggtgaaggtcttcgcgagtttttgggccttgaagcgggcccaccgaaaccaaaacccaatcagcagcatcaagatcaagcccgtggtcttgtgctgcctggttataactatctcggacccggaaacggtctcgatcgaggagagcctgtcaacagggcagacgaggtcgcgcgagagcacgacatctcgtacaacgagcagcttgaggcgggagacaacccctacctcaagtacaaccacgcggacgccgagtttcaggagaagctcgccgacgacacatccttcgggggaaacctcggaaaggcagtctttcaggccaagaaaagggttctcgaaccttttggcctggttgaagagggtgctaagacggcccctaccggaaagcggatagacgaccactttccaaaaagaaagaaggctcggaccgaagaggactccaagccttccacctcgtcagacgccgaagctggacccagcggatcccagcagctgcaaatcccagcccaaccagcctcaagtttgggagctgatacaatgtctgcgggaggtggcggcccattgggcgacaataaccaaggtgccgatggagtgggcaatgcctcgggagattggcattgcgattccacgtggatgggggacagagtcgtcaccaagtccacccgaacctgggtgctgcccagctacaacaaccaccagtaccgagagatcaaaagcggctccgtcgacggaagcaacgccaacgcctactttggatacagcaccccctgggggtactttgactttaaccgcttccacagccactggagcccccgagactggcaaagactcatcaacaactactggggcttcagaccccggtccctcagagtcaaaatcttcaacattcaagtcaaagaggtcacggtgcaggactccaccaccaccatcgccaacaacctcacctccaccgtccaagtgtttacggacgacgactaccagctgccctacgtcgtcggcaacgggaccgagggatgcctgccggccttccctccgcaggtctttacgctgccgcagtacggttacgcgacgctgaaccgcgacaacacagaaaatcccaccgagaggagcagcttcttctgcctagagtactttcccagcaagatgctgagaacgggcaacaactttgagtttacctacaactttgaggaggtgcccttccactccagcttcgctcccagtcagaacctgttcaagctggccaacccgctggtggaccagtacttgtaccgcttcgtgagcacaaataacactggcggagtccagttcaacaagaacctggccgggagatacgccaacacctacaaaaactggttcccggggcccatgggccgaacccagggctggaacctgggctccggggtcaaccgcgccagtgtcagcgccttcgccacgaccaataggatggagctcgagggcgcgagttaccaggtgcccccgcagccgaacggcatgaccaacaacctccagggcagcaacacctatgccctggagaacactatgatcttcaacagccagccggcgaacccgggcaccaccgccacgtacctcgagggcaacatgctcatcaccagcgagagcgagacgcagccggtgaaccgcgtggcgtacaacgtcggcgggcagatggccaccaacaaccagagctccaccactgcccccgcgaccggcacgtacaacctccaggaaatcgtgcccggcagcgtgtggatggagagggacgtgtacctccaaggacccatctgggccaagatcccagagacgggggcgcactttcacccctctccggccatgggcggattcggactcaaacacccaccgcccatgatgctcatcaagaacacgcctgtgcccggaaatatcaccagcttctcggacgtgcccgtcagcagcttcatcacccagtacagcaccgggcaggtcaccgtggagatggagtgggagctcaagaaggaaaactccaagaggtggaacccagagatccagtacacaaacaactacaacgacccccagtttgtggactttgccccggacagcaccggggaatacagaaccaccagacctatcggaacccgataccttacccgacccctt

SEQ ID NO: 116 - protein, 720 aa, Adeno-associated virus
MSFVDHPPDWLEEVGEGLREFLGLEAGPPKPKPNQQHQDQARGLVLPGYNYLGPGNGLDRGEPVNRADEVAREHDISYNEQLEAGDNPYLKYNHADAEFQEKLADDTSFGGNLGKAVFQAKKRVLEPFGLVEEGAKTAPTGKRIDDHFPKRKKARTEEDSKPSTSSDAEAGPSGSQQLQIPAQPASSLGADTMSAGGGGPLGDNNQGADGVGNASGDWHCDSTWMGDRVVTKSTRTWVLPSYNNHQYREIKSGSVDGSNANAYFGYSTPWGYFDFNRFHSHWSPRDWQRLINNYWGFRPRSLRVKIFNIQVKEVTVQDSTTTIANNLTSTVQVFTDDDYQLPYVVGNGTEGCLPAFPPQVFTLPQYGYATLNRDNTENPTERSSFFCLEYFPSKMLRTGNNFEFTYNFEEVPFHSSFAPSQNLFKLANPLVDQYLYRFVSTNNTGGVQFNKNLAGRYANTYKNWFPGPMGRTQGWNLGSGVNRASVSAFATTNRMELEGASYQVPPQPNGMTNNLQGSNTYALENTMIFNSQPANPGTTATYLEGNMLITSESETQPVNRVAYNVGGQMATNNQSSTTAPATGTYNLQEIVPGSVWMERDVYLQGPIWAKIPETGAHFHPSPAMGGFGLKHPPPMMLIKNTPVPGNITSFSDVPVSSFITQYSTGQVTVEMEWELKKENSKRWNPEIQYTNNYNDPQFVDFAPDSTGEYRTTRPIGTRYL

SEQ ID NO: 117 - protein, 724 aa, Adeno-associated virus 5
MSFVDHPPDWLEEVGEGLREFLGLEAGPPKPKPNQQHQDQARGLVLPGYNYLGPGNGLDRGEPVNRADEVAREHDISYNEQLEAGDNPYLKYNHADAEFQEKLADDTSFGGNLGKAVFQAKKRVLEPFGLVEEGAKTAPTGKRIDDHFPKRKKARTEEDSKPSTSSDAEAGPSGSQQLQIPAQPASSLGADTMSAGGGGPLGDNNQGADGVGNASGDWHCDSTWMGDRVVTKSTRTWVLPSYNNHQYREIKSGSVDGSNANAYFGYSTPWGYFDFNRFHSHWSPRDWQRLINNYWGFRPRSLRVKIFNIQVKEVTVQDSTTTIANNLTSTVQVFTDDDYQLPYVVGNGTEGCLPAFPPQVFTLPQYGYATLNRDNTENPTERSSFFCLEYFPSKMLRTGNNFEFTYNFEEVPFHSSFAPSQNLFKLANPLVDQYLYRFVSTNNTGGVQFNKNLAGRYANTYKNWFPGPMGRTQGWNLGSGVNRASVSAFATTNRMELEGASYQVPPQPNGMTNNLQGSNTYALENTMIFNSQPANPGTTATYLEGNMLITSESETQPVNRVAYNVGGQMATNNQSSTTAPATGTYNLQEIVPGSVWMERDVYLQGPIWAKIPETGAHFHPSPAMGGFGLKHPPPMMLIKNTPVPGNITSFSDVPVSSFITQYSTGQVTVEMEWELKKENSKRWNPEIQYTNNYNDPQFVDFAPDSTGEYRTTRPIGTRYLTRPL

SEQ ID NO: 118 - DNA, 2175 bp, Adeno-associated virus 5
atgtcttttgttgatcaccctccagattggttggaagaagttggtgaaggtcttcgcgagtttttgggccttgaagcgggcccaccgaaaccaaaacccaatcagcagcatcaagatcaagcccgtggtcttgtgctgcctggttataactatctcggacccggaaacggtctcgatcgaggagagcctgtcaacagggcagacgaggtcgcgcgagagcacgacatctcgtacaacgagcagcttgaggcgggagacaacccctacctcaagtacaaccacgcggacgccgagtttcaggagaagctcgccgacgacacatccttcgggggaaacctcggaaaggcagtctttcaggccaagaaaagggttctcgaaccttttggcctggttgaagagggtgctaagacggcccctaccggaaagcggatagacgaccactttccaaaaagaaagaaggctcggaccgaagaggactccaagccttccacctcgtcagacgccgaagctggacccagcggatcccagcagctgcaaatcccagcccaaccagcctcaagtttgggagctgatacaatgtctgcgggaggtggcggcccattgggcgacaataaccaaggtgccgatggagtgggcaatgcctcgggagattggcattgcgattccacgtggatgggggacagagtcgtcaccaagtccacccgaacctgggtgctgcccagctacaacaaccaccagtaccgagagatcaaaagcggctccgtcgacggaagcaacgccaacgcctactttggatacagcaccccctgggggtactttgactttaaccgcttccacagccactggagcccccgagactggcaaagactcatcaacaactactggggcttcagaccccggtccctcagagtcaaaatcttcaacattcaagtcaaagaggtcacggtgcaggactccaccaccaccatcgccaacaacctcacctccaccgtccaagtgtttacggacgacgactaccagctgccctacgtcgtcggcaacgggaccgagggatgcctgccggccttccctccgcaggtctttacgctgccgcagtacggttacgcgacgctgaaccgcgacaacacagaaaatcccaccgagaggagcagcttcttctgcctagagtactttcccagcaagatgctgagaacgggcaacaactttgagtttacctacaactttgaggaggtgcccttccactccagcttcgctcccagtcagaacctgttcaagctggccaacccgctggtggaccagtacttgtaccgcttcgtgagcacaaataacactggcggagtccagttcaacaagaacctggccgggagatacgccaacacctacaaaaactggttcccggggcccatgggccgaacccagggctggaacctgggctccggggtcaaccgcgccagtgtcagcgccttcgccacgaccaataggatggagctcgagggcgcgagttaccaggtgcccccgcagccgaacggcatgaccaacaacctccagggcagcaacacctatgccctggagaacactatgatcttcaacagccagccggcgaacccgggcaccaccgccacgtacctcgagggcaacatgctcatcaccagcgagagcgagacgcagccggtgaaccgcgtggcgtacaacgtcggcgggcagatggccaccaacaaccagagctccaccactgcccccgcgaccggcacgtacaacctccaggaaatcgtgcccggcagcgtgtggatggagagggacgtgtacctccaaggacccatctgggccaagatcccagagacgggggcgcactttcacccctctccggccatgggcggattcggactcaaacacccaccgcccatgatgctcatcaagaacacgcctgtgcccggaaatatcaccagcttctcggacgtgcccgtcagcagcttcatcacccagtacagcaccgggcaggtcaccgtggagatggagtgggagctcaagaaggaaaactccaagaggtggaacccagagatccagtacacaaacaactacaacgacccccagtttgtggactttgccccggacagcaccggggaatacagaaccaccagacctatcggaacccgataccttacccgacccctttaa

SEQ ID NO: 119 - DNA, 2208 bp, Adeno-associated virus 6
atggctgccgatggttatcttccagattggctcgaggacaacctctctgagggcattcgcgagtggtgggacttgaaacctggagccccgaaacccaaagccaaccagcaaaagcaggacgacggccggggtctggtgcttcctggctacaagtacctcggacccttcaacggactcgacaagggggagcccgtcaacgcggcggatgcagcggccctcgagcacgacaaggcctacgaccagcagctcaaagcgggtgacaatccgtacctgcggtataaccacgccgacgccgagtttcaggagcgtctgcaagaagatacgtcttttgggggcaacctcgggcgagcagtcttccaggccaagaagagggttctcgaaccttttggtctggttgaggaaggtgctaagacggctcctggaaagaaacgtccggtagagcagtcgccacaagagccagactcctcctcgggcattggcaagacaggccagcagcccgctaaaaagagactcaattttggtcagactggcgactcagagtcagtccccgacccacaacctctcggagaacctccagcaacccccgctgctgtgggacctactacaatggcttcaggcggtggcgcaccaatggcagacaataacgaaggcgccgacggagtgggtaatgcctcaggaaattggcattgcgattccacatggctgggcgacagagtcatcaccaccagcacccgaacatgggccttgcccacctataacaaccacctctacaagcaaatctccagtgcttcaacgggggccagcaacgacaaccactacttcggctacagcaccccctgggggtattttgatttcaacagattccactgccatttctcaccacgtgactggcagcgactcatcaacaacaattggggattccggcccaagagactcaacttcaagctcttcaacatccaagtcaaggaggtcacgacgaatgatggcgtcacgaccatcgctaataaccttaccagcacggttcaagtcttctcggactcggagtaccagttgccgtacgtcctcggctctgcgcaccagggctgcctccctccgttcccggcggacgtgttcatgattccgcagtacggctacctaacgctcaacaatggcagccaggcagtgggacggtcatccttttactgcctggaatatttcccatcgcagatgctgagaacgggcaataactttaccttcagctacaccttcgaggacgtgcctttccacagcagctacgcgcacagccagagcctggaccggctgatgaatcctctcatcgaccagtacctgtattacctgaacagaactcagaatcagtccggaagtgcccaaaacaaggacttgctgtttagccgggggtctccagctggcatgtctgttcagcccaaaaactggctacctggaccctgttaccggcagcagcgcgtttctaaaacaaaaacagacaacaacaacagcaactttacctggactggtgcttcaaaatataaccttaatgggcgtgaatctataatcaaccctggcactgctatggcctcacacaaagacgacaaagacaagttctttcccatgagcggtgtcatgatttttggaaaggagagcgccggagcttcaaacactgcattggacaatgtcatgatcacagacgaagaggaaatcaaagccactaaccccgtggccaccgaaagatttgggactgtggcagtcaatctccagagcagcagcacagaccctgcgaccggagatgtgcatgttatgggagccttacctggaatggtgtggcaagacagagacgtatacctgcagggtcctatttgggccaaaattcctcacacggatggacactttcacccgtctcctctcatgggcggctttggacttaagcacccgcctcctcagatcctcatcaaaaacacgcctgttcctgcgaatcctccggcagagttttcggctacaaagtttgcttcattcatcacccagtattccacaggacaagtgagcgtggagattgaatgggagctgcagaaagaaaacagcaaacgctggaatcccgaagtgcagtatacatctaactatgcaaaatctgccaacgttgatttcactgtggacaacaatggactttatactgagcctcgccccattggcacccgttacctcacccgtcccctg

SEQ ID NO: 120 - protein, 736 aa, Adeno-associated virus 6
MAADGYLPDWLEDNLSEGIREWWDLKPGAPKPKANQQKQDDGRGLVLPGYKYLGPFNGLDKGEPVNAADAAALEHDKAYDQQLKAGDNPYLRYNHADAEFQERLQEDTSFGGNLGRAVFQAKKRVLEPFGLVEEGAKTAPGKKRPVEQSPQEPDSSSGIGKTGQQPAKKRLNFGQTGDSESVPDPQPLGEPPATPAAVGPTTMASGGGAPMADNNEGADGVGNASGNWHCDSTWLGDRVITTSTRTWALPTYNNHLYKQISSASTGASNDNHYFGYSTPWGYFDFNRFHCHFSPRDWQRLINNNWGFRPKRLNFKLFNIQVKEVTTNDGVTTIANNLTSTVQVFSDSEYQLPYVLGSAHQGCLPPFPADVFMIPQYGYLTLNNGSQAVGRSSFYCLEYFPSQMLRTGNNFTFSYTFEDVPFHSSYAHSQSLDRLMNPLIDQYLYYLNRTQNQSGSAQNKDLLFSRGSPAGMSVQPKNWLPGPCYRQQRVSKTKTDNNNSNFTWTGASKYNLNGRESIINPGTAMASHKDDKDKFFPMSGVMIFGKESAGASNTALDNVMITDEEEIKATNPVATERFGTVAVNLQSSSTDPATGDVHVMGALPGMVWQDRDVYLQGPIWAKIPHTDGHFHPSPLMGGFGLKHPPPQILIKNTPVPANPPAEFSATKFASFITQYSTGQVSVEIEWELQKENSKRWNPEVQYTSNYAKSANVDFTVDNNGLYTEPRPIGTRYLTRPL

SEQ ID NO: 121 - protein, 623 aa, Adeno-associated virus 6
MPGFYEIVIKVPSDLDEHLPGISDSFVNWVAEKEWELPPDSDMDLNLIEQAPLTVAEKLQRDFLVQWRRVSKAPEALFFVQFEKGESYFHLHILVETTGVKSMVLGRFLSQIRDKLVQTIYRGIEPTLPNWFAVTKTRNGAGGGNKVVDECYIPNYLLPKTQPELQWAWTNMEEYISACLNLAERKRLVAHDLTHVSQTQEQNKENLNPNSDAPVIRSKTSARYMELVGWLVDRGITSEKQWIQEDQASYISFNAASNSRSQIKAALDNAGKIMALTKSAPDYLVGPAPPADIKTNRIYRILELNGYDPAYAGSVFLGWAQKRFGKRNTIWLFGPATTGKTNIAEAIAHAVPFYGCVNWTNENFPFNDCVDKMVIWWEEGKMTAKVVESAKAILGGSKVRVDQKCKSSAQIDPTPVIVTSNTNMCAVIDGNSTTFEHQQPLQDRMFKFELTRRLEHDFGKVTKQEVKEFFRWAQDHVTEVAHEFYVRKGGANKRPAPDDADKSEPKRACPSVADPSTSDAEGAPVDFADRYQNKCSRHAGMLQMLFPCKTCERMNQNFNICFTHGTRDCSECFPGVSESQPVVRKRTYRKLCAIHHLLGRAPEIACSACDLVNVDLDDCVSEQ

SEQ ID NO: 122 - DNA, 4683 bp, Adeno-associated virus 6
ttggccactccctctctgcgcgctcgctcgctcactgaggccgggcgaccaaaggtcgcccgacgcccgggctttgcccgggcggcctcagtgagcgagcgagcgcgcagagagggagtggccaactccatcactaggggttcctggaggggtggagtcgtgacgtgaattacgtcatagggttagggaggtcctgtattagaggtcacgtgagtgttttgcgacattttgcgacaccatgtggtcacgctgggtatttaagcccgagtgagcacgcagggtctccattttgaagcgggaggtttgaacgcgcagcgccatgccggggttttacgagattgtgattaaggtccccagcgaccttgacgagcatctgcccggcatttctgacagctttgtgaactgggtggccgagaaggaatgggagttgccgccagattctgacatggatctgaatctgattgagcaggcacccctgaccgtggccgagaagctgcagcgcgacttcctggtccagtggcgccgcgtgagtaaggccccggaggccctcttctttgttcagttcgagaagggcgagtcctacttccacctccatattctggtggagaccacgggggtcaaatccatggtgctgggccgcttcctgagtcagattagggacaagctggtgcagaccatctaccgcgggatcgagccgaccctgcccaactggttcgcggtgaccaagacgcgtaatggcgccggaggggggaacaaggtggtggacgagtgctacatccccaactacctcctgcccaagactcagcccgagctgcagtgggcgtggactaacatggaggagtatataagcgcgtgtttaaacctggccgagcgcaaacggctcgtggcgcacgacctgacccacgtcagccagacccaggagcagaacaaggagaatctgaaccccaattctgacgcgcctgtcatccggtcaaaaacctccgcacgctacatggagctggtcgggtggctggtggaccggggcatcacctccgagaagcagtggatccaggaggaccaggcctcgtacatctccttcaacgccgcctccaactcgcggtcccagatcaaggccgctctggacaatgccggcaagatcatggcgctgaccaaatccgcgcccgactacctggtaggccccgctccgcccgccgacattaaaaccaaccgcatttaccgcatcctggagctgaacggctacgaccctgcctacgccggctccgtctttctcggctgggcccagaaaaggttcggaaaacgcaacaccatctggctgtttgggccggccaccacgggcaagaccaacatcgcggaagccatcgcccacgccgtgcccttctacggctgcgtcaactggaccaatgagaactttcccttcaacgattgcgtcgacaagatggtgatctggtgggaggagggcaagatgacggccaaggtcgtggagtccgccaaggccattctcggcggcagcaaggtgcgcgtggaccaaaagtgcaagtcgtccgcccagatcgatcccacccccgtgatcgtcacctccaacaccaacatgtgcgccgtgattgacgggaacagcaccaccttcgagcaccagcagccgttgcaggaccggatgttcaaatttgaactcacccgccgtctggagcatgactttggcaaggtgacaaagcaggaagtcaaagagttcttccgctgggcgcaggatcacgtgaccgaggtggcgcatgagttctacgtcagaaagggtggagccaacaagagacccgcccccgatgacgcggataaaagcgagcccaagcgggcctgcccctcagtcgcggatccatcgacgtcagacgcggaaggagctccggtggactttgccgacaggtaccaaaacaaatgttctcgtcacgcgggcatgcttcagatgctgtttccctgcaaaacatgcgagagaatgaatcagaatttcaacatttgcttcacgcacgggaccagagactgttcagaatgtttccccggcgtgtcagaatctcaaccggtcgtcagaaagaggacgtatcggaaactctgtgccattcatcatctgctggggcgggctcccgagattgcttgctcggcctgcgatctggtcaacgtggatctggatgactgtgtttctgagcaataaatgacttaaaccaggtatggctgccgatggttatcttccagattggctcgaggacaacctctctgagggcattcgcgagtggtgggacttgaaacctggagccccgaaacccaaagccaaccagcaaaagcaggacgacggccggggtctggtgcttcctggctacaagtacctcggacccttcaacggactcgacaagggggagcccgtcaacgcggcggatgcagcggccctcgagcacgacaaggcctacgaccagcagctcaaagcgggtgacaatccgtacctgcggtataaccacgccgacgccgagtttcaggagcgtctgcaagaagatacgtcttttgggggcaacctcgggcgagcagtcttccaggccaagaagagggttctcgaaccttttggtctggttgaggaaggtgctaagacggctcctggaaagaaacgtccggtagagcagtcgccacaagagccagactcctcctcgggcattggcaagacaggccagcagcccgctaaaaagagactcaattttggtcagactggcgactcagagtcagtccccgacccacaacctctcggagaacctccagcaacccccgctgctgtgggacctactacaatggcttcaggcggtggcgcaccaatggcagacaataacgaaggcgccgacggagtgggtaatgcctcaggaaattggcattgcgattccacatggctgggcgacagagtcatcaccaccagcacccgaacatgggccttgcccacctataacaaccacctctacaagcaaatctccagtgcttcaacgggggccagcaacgacaaccactacttcggctacagcaccccctgggggtattttgatttcaacagattccactgccatttctcaccacgtgactggcagcgactcatcaacaacaattggggattccggcccaagagactcaacttcaagctcttcaacatccaagtcaaggaggtcacgacgaatgatggcgtcacgaccatcgctaataaccttaccagcacggttcaagtcttctcggactcggagtaccagttgccgtacgtcctcggctctgcgcaccagggctgcctccctccgttcccggcggacgtgttcatgattccgcagtacggctacctaacgctcaacaatggcagccaggcagtgggacggtcatccttttactgcctggaatatttcccatcgcagatgctgagaacgggcaataactttaccttcagctacaccttcgaggacgtgcctttccacagcagctacgcgcacagccagagcctggaccggctgatgaatcctctcatcgaccagtacctgtattacctgaacagaactcagaatcagtccggaagtgcccaaaacaaggacttgctgtttagccgggggtctccagctggcatgtctgttcagcccaaaaactggctacctggaccctgttaccggcagcagcgcgtttctaaaacaaaaacagacaacaacaacagcaactttacctggactggtgcttcaaaatataaccttaatgggcgtgaatctataatcaaccctggcactgctatggcctcacacaaagacgacaaagacaagttctttcccatgagcggtgtcatgatttttggaaaggagagcgccggagcttcaaacactgcattggacaatgtcatgatcacagacgaagaggaaatcaaagccactaaccccgtggccaccgaaagatttgggactgtggcagtcaatctccagagcagcagcacagaccctgcgaccggagatgtgcatgttatgggagccttacctggaatggtgtggcaagacagagacgtatacctgcagggtcctatttgggccaaaattcctcacacggatggacactttcacccgtctcctctcatgggcggctttggacttaagcacccgcctcctcagatcctcatcaaaaacacgcctgttcctgcgaatcctccggcagagttttcggctacaaagtttgcttcattcatcacccagtattccacaggacaagtgagcgtggagattgaatgggagctgcagaaagaaaacagcaaacgctggaatcccgaagtgcagtatacatctaactatgcaaaatctgccaacgttgatttcactgtggacaacaatggactttatactgagcctcgccccattggcacccgttacctcacccgtcccctgtaattgtgtgttaatcaataaaccggttaattcgtgtcagttgaactttggtctcatgtcgttattatcttatctggtcaccatagcaaccggttacacattaactgcttagttgcgcttcgcgaatacccctagtgatggagttgcccactccctctatgcgcgctcgctcgctcggtggggccggcagagcagagctctgccgtctgcggacctttggtccgcaggccccaccgagcgagcgagcgcgcatagagggagtgggcaa

SEQ ID NO: 123 - DNA, 2211 bp, Adeno-associated virus 6
atggctgccgatggttatcttccagattggctcgaggacaacctctctgagggcattcgcgagtggtgggacttgaaacctggagccccgaaacccaaagccaaccagcaaaagcaggacgacggccggggtctggtgcttcctggctacaagtacctcggacccttcaacggactcgacaagggggagcccgtcaacgcggcggatgcagcggccctcgagcacgacaaggcctacgaccagcagctcaaagcgggtgacaatccgtacctgcggtataaccacgccgacgccgagtttcaggagcgtctgcaagaagatacgtcttttgggggcaacctcgggcgagcagtcttccaggccaagaagagggttctcgaaccttttggtctggttgaggaaggtgctaagacggctcctggaaagaaacgtccggtagagcagtcgccacaagagccagactcctcctcgggcattggcaagacaggccagcagcccgctaaaaagagactcaattttggtcagactggcgactcagagtcagtccccgacccacaacctctcggagaacctccagcaacccccgctgctgtgggacctactacaatggcttcaggcggtggcgcaccaatggcagacaataacgaaggcgccgacggagtgggtaatgcctcaggaaattggcattgcgattccacatggctgggcgacagagtcatcaccaccagcacccgaacatgggccttgcccacctataacaaccacctctacaagcaaatctccagtgcttcaacgggggccagcaacgacaaccactacttcggctacagcaccccctgggggtattttgatttcaacagattccactgccatttctcaccacgtgactggcagcgactcatcaacaacaattggggattccggcccaagagactcaacttcaagctcttcaacatccaagtcaaggaggtcacgacgaatgatggcgtcacgaccatcgctaataaccttaccagcacggttcaagtcttctcggactcggagtaccagttgccgtacgtcctcggctctgcgcaccagggctgcctccctccgttcccggcggacgtgttcatgattccgcagtacggctacctaacgctcaacaatggcagccaggcagtgggacggtcatccttttactgcctggaatatttcccatcgcagatgctgagaacgggcaataactttaccttcagctacaccttcgaggacgtgcctttccacagcagctacgcgcacagccagagcctggaccggctgatgaatcctctcatcgaccagtacctgtattacctgaacagaactcagaatcagtccggaagtgcccaaaacaaggacttgctgtttagccgggggtctccagctggcatgtctgttcagcccaaaaactggctacctggaccctgttaccggcagcagcgcgtttctaaaacaaaaacagacaacaacaacagcaactttacctggactggtgcttcaaaatataaccttaatgggcgtgaatctataatcaaccctggcactgctatggcctcacacaaagacgacaaagacaagttctttcccatgagcggtgtcatgatttttggaaaggagagcgccggagcttcaaacactgcattggacaatgtcatgatcacagacgaagaggaaatcaaagccactaaccccgtggccaccgaaagatttgggactgtggcagtcaatctccagagcagcagcacagaccctgcgaccggagatgtgcatgttatgggagccttacctggaatggtgtggcaagacagagacgtatacctgcagggtcctatttgggccaaaattcctcacacggatggacactttcacccgtctcctctcatgggcggctttggacttaagcacccgcctcctcagatcctcatcaaaaacacgcctgttcctgcgaatcctccggcagagttttcggctacaaagtttgcttcattcatcacccagtattccacaggacaagtgagcgtggagattgaatgggagctgcagaaagaaaacagcaaacgctggaatcccgaagtgcagtatacatctaactatgcaaaatctgccaacgttgatttcactgtggacaacaatggactttatactgagcctcgccccattggcacccgttacctcacccgtcccctgtaa

SEQ ID NO: 124 - protein, 736 aa, Adeno-associated virus; identical to SEQ ID NO: 120

SEQ ID NO: 125 - protein, 736 aa, Adeno-associated virus
MAADGYLPDWLEDNLSEGIREWWDLKPGAPKPKANQQKQDDGRGLVLPGYKYLGPFNGLDKGEPVNAADAAALEHDKAYDQQLKAGDNPYLRYNHADAEFQERLQEDTSFGGNLGRAVFQAKKRVLEPFGLVEEGAKTAPGKKRPVEQSPQEPDSSSGIGKTGQQPAKKRLNFGQTGDSESVPDPQPLGEPPATPAAVGPTTMASGGGAPMADNNEGADGVGNASGNWHCDSTWLGDRVITTSTRTWALPTYNNHLYKQISSASTGASNDNHYFGYSTPWGYFDFNRFHCHFSPRDWQRLINNNWGFRPKRLNFKLFNIQVKEVTTNDGVTTIANNLTSTVQVFSDSEYQLPYVLGSAHQGCLPPFPADVFMIPQYGYLTLNNGSQAVGRSSFYCLEYFPSQMLRTGNNFTFSYTFEDVPFHSSYAHSQSLDRLMNPLIDQYLYYLNRTQNQSGSAQNKDLLFSRGSPAGMSVQPKNWLPGPCYRQQRVSKTKTDNNNSNFTWTGASKYNLNGRESIINPGTAMASHKDDEDKFFPMSGVMIFGKESAGASNTALDNVMITDEEEIKATNPVATERFGTVAVNLQSSSTDPATGDVHVMGALPGMVWQDRDVYLQGPIWAKIPHTDGHFHPSPLMGGFGLKHPPPQILIKNTPVPANPPAEFSATKFASFITQYSTGQVSVEIEWELQKENSKRWNPEVQYTSNYAKSANVDFTVDNNGLYTEPRPIGTRYLTRPL

SEQ ID NO: 126 - protein, 736 aa, Adeno-associated virus
MAADGYLPDWLEDNLSEGIREWWDLKPGAPKPKANQQKQDDGRGLVLPGYKYLGPFNGLDKGEPVNAADAAALEHDKAYDQQLKAGDNPYLRYNHADAEFQERLQEDTSFGGNLGRAVFQAKKRVLEPLGLVEEGAKTAPGKKRPVEQSPQEPDSSSGIGKTGQQPAKKRLNFGQTGDSESVPDPQPLGEPPATPAAVGPTTMASGGGAPMADNNEGADGVGNASGNWHCDSTWLGDRVITTSTRTWALPTYNNHLYKQISSASTGASNDNHYFGYSTPWGYFDFNRFHCHFSPRDWQRLINNNWGFRPKRLNFKLFNIQVKEVTTNDGVTTIANNLTSTVQVFSDSEYQLPYVLGSAHQGCLPPFPADVFMIPQYGYLTLNNGSQAVGRSSFYCLEYFPSQMLRTGNNFTFSYTFEDVPFHSSYAHSQSLDRLMNPLIDQYLYYLNRTQNQSGSAQNKDLLFSRGSPAGMSVQPKNWLPGPCYRQQRVSKTKTDNNNSNFTWTGASKYNLNGRESIINPGTAMASHKDDEDKFFPMSGVMIFGKESAGASNTALDNVMITDEEEIKATNPVATERFGTVAVNLQSSSTDPATGDVHVMGALPGMVWQDRDVYLQGPIWAKIPHTDGHFHPSPLMGGFGLKHPPPQILIKNTPVPANPPAEFSATKFASFITQYSTGQVSVEIEWELQKENSKRWNPEVQYTSNYAKSANVDFTVDNNGLYTEPRPIGTRYLTRPL

SEQ ID NO: 127 - protein, 736 aa, Adeno-associated virus
MAADGYLPDWLEDNLSEGIREWWDLKPGAPKPKANQQKQDDGRGLVLPGYKYLGPFNGLDKGEPVNAADAAALEHDKAYDQQLKAGDNPYLRYNHADAEFQERLQEDTSFGGNLGRAVFQAKKRVLEPLGLVEEGAKTAPGKKRPVEQSPQEPDSSSGIGKTGQQPAKKRLNFGQTGDSESVPDPQPLGEPPATPAAVGPTTMASGGGAPMADNNEGADGVGNASGNWHCDSTWLGDRVITTSTRTWALPTYNNHLYKQISSASTGASNDNHYFGYSTPWGYFDFNRFHCHFSPRDWQRLINNNWGFRPKRLNFKLFNIQVKEVTTNDGVTTIANNLTSTVQVFSDSEYQLPYVLGSAHQGCLPPFPADVFMIPQYGYLTLNNGSQAVGRSSFYCLEYFPSQMLRTGNNFTFSYTFEDVPFHSSYAHSQSLDRLMNPLIDQYLYYLNRTQNQSGSAQNKDLLFSRGSPAGMSVQPKNWLPGPCYRQQRVSKTKTDNNNSNFTWTGASKYNLNGRESIINPGTAMASHKDDKDKFFPMSGVMIFGKESAGASNTALDNVMITDEEEIKATNPVATERFGTVAVNLQSSSTDPATGDVHVMGALPGMVWQDRDVYLQGPIWAKIPHTDGHFHPSPLMGGFGLKHPPPQILIKNTPVPANPPAEFSATKFASFITQYSTGQVSVEIEWELQKENSKRWNPEVQYTSNYAKSANVDFTVDNNGLYTEPRPIGTRYLTRPL

SEQ ID NO: 128 - DNA, 2214 bp, Adeno-associated virus 7
atggctgccgatggttatcttccagattggctcgaggacaacctctctgagggcattcgcgagtggtgggacctgaaacctggagccccgaaacccaaagccaaccagcaaaagcaggacaacggccggggtctggtgcttcctggctacaagtacctcggacccttcaacggactcgacaagggggagcccgtcaacgcggcggacgcagcggccctcgagcacgacaaggcctacgaccagcagctcaaagcgggtgacaatccgtacctgcggtataaccacgccgacgccgagtttcaggagcgtctgcaagaagatacgtcatttgggggcaacctcgggcgagcagtcttccaggccaagaagcgggttctcgaacctctcggtctggttgaggaaggcgctaagacggctcctgcaaagaagagaccggtagagccgtcacctcagcgttcccccgactcctccacgggcatcggcaagaaaggccagcagcccgccagaaagagactcaatttcggtcagactggcgactcagagtcagtccccgaccctcaacctctcggagaacctccagcagcgccctctagtgtgggatctggtacagtggctgcaggcggtggcgcaccaatggcagacaataacgaaggtgccgacggagtgggtaatgcctcaggaaattggcattgcgattccacatggctgggcgacagagtcattaccaccagcacccgaacctgggccctgcccacctacaacaaccacctctacaagcaaatctccagtgaaactgcaggtagtaccaacgacaacacctacttcggctacagcaccccctgggggtattttgactttaacagattccactgccacttctcaccacgtgactggcagcgactcatcaacaacaactggggattccggcccaagaagctgcggttcaagctcttcaacatccaggtcaaggaggtcacgacgaatgacggcgttacgaccatcgctaataaccttaccagcacgattcaggtattctcggactcggaataccagctgccgtacgtcctcggctctgcgcaccagggctgcctgcctccgttcccggcggacgtcttcatgattcctcagtacggctacctgactctcaacaatggcagtcagtctgtgggacgttcctccttctactgcctggagtacttcccctctcagatgctgagaacgggcaacaactttgagttcagctacagcttcgaggacgtgcctttccacagcagctacgcacacagccagagcctggaccggctgatgaatcccctcatcgaccagtacttgtactacctggccagaacacagagtaacccaggaggcacagctggcaatcgggaactgcagttttaccagggcgggccttcaactatggccgaacaagccaagaattggttacctggaccttgcttccggcaacaaagagtctccaaaacgctggatcaaaacaacaacagcaactttgcttggactggtgccaccaaatatcacctgaacggcagaaactcgttggttaatcccggcgtcgccatggcaactcacaaggacgacgaggaccgctttttcccatccagcggagtcctgatttttggaaaaactggagcaactaacaaaactacattggaaaatgtgttaatgacaaatgaagaagaaattcgtcctactaatcctgtagccacggaagaatacgggatagtcagcagcaacttacaagcggctaatactgcagcccagacacaagttgtcaacaaccagggagccttacctggcatggtctggcagaaccgggacgtgtacctgcagggtcccatctgggccaagattcctcacacggatggcaactttcacccgtctcctttgatgggcggctttggacttaaacatccgcctcctcagatcctgatcaagaacactcccgttcccgctaatcctccggaggtgtttactcctgccaagtttgcttcgttcatcacacagtacagcaccggacaagtcagcgtggaaatcgagtgggagctgcagaaggaaaacagcaagcgctggaacccggagattcagtacacctccaactttgaaaagcagactggtgtggactttgccgttgacagccagggtgtttactctgagcctcgccctattggcactcgttacctcacccgtaatctgtaa

SEQ ID NO: 129 - protein, 738 aa, Adeno-associated virus 7
MAADGYLPDWLEDNLSEGIREWWALKPGAPKPKANQQKQDDGRGLVLPGYKYLGPFNGLDKGEPVNAADAAALEHDKAYDQQLQAGDNPYLRYNHADAEFQERLQEDTSFGGNLGRAVFQAKKRVLEPLGLVEEGAKTAPGKKRPVEPSPQRSPDSSTGIGKKGQQPARKRLNFGQTGDSESVPDPQPLGEPPAAPSGVGPNTMAAGGGAPMADNNEGADGVGSSSGNWHCDSTWLGDRVITTSTRTWALPTYNNHLYKQISNGTSGGATNDNTYFGYSTPWGYFDFNRFHCHFSPRDWQRLINNNWGFRPKRLSFKLFNIQVKEVTQNEGTKTIANNLTSTIQVFTDSEYQLPYVLGSAHQGCLPPFPADVFMIPQYGYLTLNNGSQAVGRSSFYCLEYFPSQMLRTGNNFQFTYTFEDVPFHSSYAHSQSLDRLMNPLIDQYLYYLSRTQTTGGTANTQTLGFSQGGPNTMANQAKNWLPGPCYRQQRVSTTTGQNNNSNFAWTAGTKYHLNGRNSLANPGIAMATHKDDEERFFPSNGILIFGKQNAARDNADYSDVMLTSEEEIKTTNPVATEEYGIVADNLQQQNTAPQIGTVNSQGALPGMVWQNRDVYLQGPIWAKIPHTDGNFHPSPLMGGFGLKHPPPQILIKNTPVPADPPTTFNQSKLNSFITQYSTGQVSVEIEWELQKENSKRWNPEIQYTSNYYKSTSVDFAVNTEGVYSEPRPIGTRYLTRNL

SEQ ID NO: 130 - protein, 737 aa, Adeno-associated virus 7
MAADGYLPDWLEDNLSEGIREWWDLKPGAPKPKANQQKQDNGRGLVLPGYKYLGPFNGLDKGEPVNAADAAALEHDKAYDQQLKAGDNPYLRYNHADAEFQERLQEDTSFGGNLGRAVFQAKKRVLEPLGLVEEGAKTAPAKKRPVEPSPQRSPDSSTGIGKKGQQPARKRLNFGQTGDSESVPDPQPLGEPPAAPSSVGSGTVAAGGGAPMADNNEGADGVGNASGNWHCDSTWLGDRVITTSTRTWALPTYNNHLYKQISSETAGSTNDNTYFGYSTPWGYFDFNRFHCHFSPRDWQRLINNNWGFRPKKLRFKLFNIQVKEVTTNDGVTTIANNLTSTIQVFSDSEYQLPYVLGSAHQGCLPPFPADVFMIPQYGYLTLNNGSQSVGRSSFYCLEYFPSQMLRTGNNFEFSYSFEDVPFHSSYAHSQSLDRLMNPLIDQYLYYLARTQSNPGGTAGNRELQFYQGGPSTMAEQAKNWLPGPCFRQQRVSKTLDQNNNSNFAWTGATKYHLNGRNSLVNPGVAMATHKDDEDRFFPSSGVLIFGKTGATNKTTLENVLMTNEEEIRPTNPVATEEYGIVSSNLQAANTAAQTQVVNNQGALPGMVWQNRDVYLQGPIWAKIPHTDGNFHPSPLMGGFGLKHPPPQILIKNTPVPANPPEVFTPAKFASFITQYSTGQVSVEIEWELQKENSKRWNPEIQYTSNFEKQTGVDFAVDSQGVYSEPRPIGTRYLTRNL

SEQ ID NO: 131 - protein, 623 aa, Adeno-associated virus 7
MPGFYEIVIKVPSDLDEHLPGISDSFVNWVAEKEWELPPDSDMDLNLIEQAPLTVAEKLQRDFLVQWRRVSKAPEALFFVQFEKGESYFHLHVLVETTGVKSMVLGRFLSQIREKLVQTIYRGVEPTLPNWFAVTKTRNGAGGGNKVVDECYIPNYLLPKTQPELQWAWTNMEEYISACLNLAERKRLVAQHLTHVSQTQEQNKENLNPNSDAPVIRSKTSARYMELVGWLVDRGITSEKQWIQEDQASYISFNAASNSRSQIKAALDNAGKIMALTKSAPDYLVGPSLPADIKTNRIYRILELNGYDPAYAGSVFLGWAQKKFGKRNTIWLFGPATTGKTNIAEAIAHAVPFYGCVNWTNENFPFNDCVDKMVIWWEEGKMTAKVVESAKAILGGSKVRVDQKCKSSAQIDPTPVIVTSNTNMCAVIDGNSTTFEHQQPLQDRMFKFELTRRLEHDFGKVTKQEVKEFFRWASDHVTEVAHEFYVRKGGASKRPAPDDADISEPKRACPSVADPSTSDAEGAPVDFADRYQNKCSRHAGMIQMLFPCKTCERMNQNFNICFTHGVRDCLECFPGVSESQPVVRKKTYRKLCAIHHLLGRAPEIACSACDLVNVDLDDCVSEQ

SEQ ID NO: 132 - DNA, 4721 bp, Adeno-associated virus 7
ttggccactccctctatgcgcgctcgctcgctcggtggggcctgcggaccaaaggtccgcagacggcagagctctgctctgccggccccaccgagcgagcgagcgcgcatagagggagtggccaactccatcactaggggtaccgcgaagcgcctcccacgctgccgcgtcagcgctgacgtaaatcacgtcataggggagtggtcctgtattagctgtcacgtgagtgcttttgcgacattttgcgacaccacgtggccatttgaggtatatatggccgagtgagcgagcaggatctccattttgaccgcgaaatttgaacgagcagcagccatgccgggtttctacgagatcgtgatcaaggtgccgagcgacctggacgagcacctgccgggcatttctgactcgtttgtgaactgggtggccgagaaggaatgggagctgcccccggattctgacatggatctgaatctgatcgagcaggcacccctgaccgtggccgagaagctgcagcgcgacttcctggtccaatggcgccgcgtgagtaaggccccggaggccctgttctttgttcagttcgagaagggcgagagctacttccaccttcacgttctggtggagaccacgggggtcaagtccatggtgctaggccgcttcctgagtcagattcgggagaagctggtccagaccatctaccgcggggtcgagcccacgctgcccaactggttcgcggtgaccaagacgcgtaatggcgccggcggggggaacaaggtggtggacgagtgctacatccccaactacctcctgcccaagacccagcccgagctgcagtgggcgtggactaacatggaggagtatataagcgcgtgtttgaacctggccgaacgcaaacggctcgtggcgcagcacctgacccacgtcagccagacgcaggagcagaacaaggagaatctgaaccccaattctgacgcgcccgtgatcaggtcaaaaacctccgcgcgctacatggagctggtcgggtggctggtggaccggggcatcacctccgagaagcagtggatccaggaggaccaggcctcgtacatctccttcaacgccgcctccaactcgcggtcccagatcaaggccgcgctggacaatgccggcaagatcatggcgctgaccaaatccgcgcccgactacctggtggggccctcgctgcccgcggacattaaaaccaaccgcatctaccgcatcctggagctgaacgggtacgatcctgcctacgccggctccgtctttctcggctgggcccagaaaaagttcgggaagcgcaacaccatctggctgtttgggcccgccaccaccggcaagaccaacattgcggaagccatcgcccacgccgtgcccttctacggctgcgtcaactggaccaatgagaactttcccttcaacgattgcgtcgacaagatggtgatctggtgggaggagggcaagatgacggccaaggtcgtggagtccgccaaggccattctcggcggcagcaaggtgcgcgtggaccaaaagtgcaagtcgtccgcccagatcgaccccacccccgtgatcgtcacctccaacaccaacatgtgcgccgtgattgacgggaacagcaccaccttcgagcaccagcagccgttgcaggaccggatgttcaaatttgaactcacccgccgtctggagcacgactttggcaaggtgacgaagcaggaagtcaaagagttcttccgctgggccagtgatcacgtgaccgaggtggcgcatgagttctacgtcagaaagggcggagccagcaaaagacccgcccccgatgacgcggatataagcgagcccaagcgggcctgcccctcagtcgcggatccatcgacgtcagacgcggaaggagctccggtggactttgccgacaggtaccaaaacaaatgttctcgtcacgcgggcatgattcagatgctgtttccctgcaaaacgtgcgagagaatgaatcagaatttcaacatttgcttcacacacggggtcagagactgtttagagtgtttccccggcgtgtcagaatctcaaccggtcgtcagaaaaaagacgtatcggaaactctgcgcgattcatcatctgctggggcgggcgcccgagattgcttgctcggcctgcgacctggtcaacgtggacctggacgactgcgtttctgagcaataaatgacttaaaccaggtatggctgccgatggttatcttccagattggctcgaggacaacctctctgagggcattcgcgagtggtgggacctgaaacctggagccccgaaacccaaagccaaccagcaaaagcaggacaacggccggggtctggtgcttcctggctacaagtacctcggacccttcaacggactcgacaagggggagcccgtcaacgcggcggacgcagcggccctcgagcacgacaaggcctacgaccagcagctcaaagcgggtgacaatccgtacctgcggtataaccacgccgacgccgagtttcaggagcgtctgcaagaagatacgtcatttgggggcaacctcgggcgagcagtcttccaggccaagaagcgggttctcgaacctctcggtctggttgaggaaggcgctaagacggctcctgcaaagaagagaccggtagagccgtcacctcagcgttcccccgactcctccacgggcatcggcaagaaaggccagcagcccgccagaaagagactcaatttcggtcagactggcgactcagagtcagtccccgaccctcaacctctcggagaacctccagcagcgccctctagtgtgggatctggtacagtggctgcaggcggtggcgcaccaatggcagacaataacgaaggtgccgacggagtgggtaatgcctcaggaaattggcattgcgattccacatggctgggcgacagagtcattaccaccagcacccgaacctgggccctgcccacctacaacaaccacctctacaagcaaatctccagtgaaactgcaggtagtaccaacgacaacacctacttcggctacagcaccccctgggggtattttgactttaacagattccactgccacttctcaccacgtgactggcagcgactcatcaacaacaactggggattccggcccaagaagctgcggttcaagctcttcaacatccaggtcaaggaggtcacgacgaatgacggcgttacgaccatcgctaataaccttaccagcacgattcaggtattctcggactcggaataccagctgccgtacgtcctcggctctgcgcaccagggctgcctgcctccgttcccggcggacgtcttcatgattcctcagtacggctacctgactctcaacaatggcagtcagtctgtgggacgttcctccttctactgcctggagtacttcccctctcagatgctgagaacgggcaacaactttgagttcagctacagcttcgaggacgtgcctttccacagcagctacgcacacagccagagcctggaccggctgatgaatcccctcatcgaccagtacttgtactacctggccagaacacagagtaacccaggaggcacagctggcaatcgggaactgcagttttaccagggcgggccttcaactatggccgaacaagccaagaattggttacctggaccttgcttccggcaacaaagagtctccaaaacgctggatcaaaacaacaacagcaactttgcttggactggtgccaccaaatatcacctgaacggcagaaactcgttggttaatcccggcgtcgccatggcaactcacaaggacgacgaggaccgctttttcccatccagcggagtcctgatttttggaaaaactggagcaactaacaaaactacattggaaaatgtgttaatgacaaatgaagaagaaattcgtcctactaatcctgtagccacggaagaatacgggatagtcagcagcaacttacaagcggctaatactgcagcccagacacaagttgtcaacaaccagggagccttacctggcatggtctggcagaaccgggacgtgtacctgcagggtcccatctgggccaagattcctcacacggatggcaactttcacccgtctcctttgatgggcggctttggacttaaacatccgcctcctcagatcctgatcaagaacactcccgttcccgctaatcctccggaggtgtttactcctgccaagtttgcttcgttcatcacacagtacagcaccggacaagtcagcgtggaaatcgagtgggagctgcagaaggaaaacagcaagcgctggaacccggagattcagtacacctccaactttgaaaagcagactggtgtggactttgccgttgacagccagggtgtttactctgagcctcgccctattggcactcgttacctcacccgtaatctgtaattgcatgttaatcaataaaccggttgattcgtttcagttgaactttggtctcctgtgcttcttatcttatcggtttccatagcaactggttacacattaactgcttgggtgcgcttcacgataagaacactgacgtcaccgcggtacccctagtgatggagttggccactccctctatgcgcgctcgctcgctcggtggggcctgcggaccaaaggtccgcagacggcagagctctgctctgccggccccaccgagcgagcgagcgcgcatagagggagtggccaa

SEQ ID NO: 133 - DNA, 2214 bp, Adeno-associated virus 7; identical to SEQ ID NO: 128

SEQ ID NO: 134 - protein, 737 aa, Adeno-associated virus 7; identical to SEQ ID NO: 130

SEQ ID NO: 135 - DNA, 2217 bp, Adeno-associated virus 8
atggctgccgatggttatcttccagattggctcgaggacaacctctctgagggcattcgcgagtggtgggcgctgaaacctggagccccgaagcccaaagccaaccagcaaaagcaggacgacggccggggtctggtgcttcctggctacaagtacctcggacccttcaacggactcgacaagggggagcccgtcaacgcggcggacgcagcggccctcgagcacgacaaggcctacgaccagcagctgcaggcgggtgacaatccgtacctgcggtataaccacgccgacgccgagtttcaggagcgtctgcaagaagatacgtcttttgggggcaacctcgggcgagcagtcttccaggccaagaagcgggttctcgaacctctcggtctggttgaggaaggcgctaagacggctcctggaaagaagagaccggtagagccatcaccccagcgttctccagactcctctacgggcatcggcaagaaaggccaacagcccgccagaaaaagactcaattttggtcagactggcgactcagagtcagttccagaccctcaacctctcggagaacctccagcagcgccctctggtgtgggacctaatacaatggctgcaggcggtggcgcaccaatggcagacaataacgaaggcgccgacggagtgggtagttcctcgggaaattggcattgcgattccacatggctgggcgacagagtcatcaccaccagcacccgaacctgggccctgcccacctacaacaaccacctctacaagcaaatctccaacgggacatcgggaggagccaccaacgacaacacctacttcggctacagcaccccctgggggtattttgactttaacagattccactgccacttttcaccacgtgactggcagcgactcatcaacaacaactggggattccggcccaagagactcagcttcaagctcttcaacatccaggtcaaggaggtcacgcagaatgaaggcaccaagaccatcgccaataacctcaccagcaccatccaggtgtttacggactcggagtaccagctgccgtacgttctcggctctgcccaccagggctgcctgcctccgttcccggcggacgtgttcatgattccccagtacggctacctaacactcaacaacggtagtcaggccgtgggacgctcctccttctactgcctggaatactttccttcgcagatgctgagaaccggcaacaacttccagtttacttacaccttcgaggacgtgcctttccacagcagctacgcccacagccagagcttggaccggctgatgaatcctctgattgaccagtacctgtactacttgtctcggactcaaacaacaggaggcacggcaaatacgcagactctgggcttcagccaaggtgggcctaatacaatggccaatcaggcaaagaactggctgccaggaccctgttaccgccaacaacgcgtctcaacgacaaccgggcaaaacaacaatagcaactttgcctggactgctgggaccaaataccatctgaatggaagaaattcattggctaatcctggcatcgctatggcaacacacaaagacgacgaggagcgtttttttcccagtaacgggatcctgatttttggcaaacaaaatgctgccagagacaatgcggattacagcgatgtcatgctcaccagcgaggaagaaatcaaaaccactaaccctgtggctacagaggaatacggtatcgtggcagataacttgcagcagcaaaacacggctcctcaaattggaactgtcaacagccagggggccttacccggtatggtctggcagaaccgggacgtgtacctgcagggtcccatctgggccaagattcctcacacggacggcaacttccacccgtctccgctgatgggcggctttggcctgaaacatcctccgcctcagatcctgatcaagaacacgcctgtacctgcggatcctccgaccaccttcaaccagtcaaagctgaactctttcatcacgcaatacagcaccggacaggtcagcgtggaaattgaatgggagctgcagaaggaaaacagcaagcgctggaaccccgagatccagtacacctccaactactacaaatctacaagtgtggactttgctgttaatacagaaggcgtgtactctgaaccccgccccattggcacccgttacctcacccgtaatctgtaa

SEQ ID NO: 136 - DNA, 2213 bp, Adeno-associated virus 8
atggctgccgatggttatcttccagattggctcgaggacaacctctctgagggcattcgcgagtggtgggcgctgaaacctggagccccgaagcccaaagccaaccagcaaaagcaggacgacggccggggtctggtgcttcctggctacaagtacctcggacccttcaacggactcgacaagggggagcccgtcaacgcggcggacgcagcggccctcgagcacgacaaggcctacgaccagcagctgcaggcgggtgacaatccgtacctgcggtataaccacgccgacgccgagtttcaggagcgtctgcaagaagatacgtcttttgggggcaacctcgggcgagcagtcttccaggccaagaagcgggttctcgaacctctcggtctggttgaggaaggcgctaagacggctcctggaaagaagagaccggtagagccatcaccccagcgttctccagactcctctacgggcatcggcaagaaaggccaacagcccgccagaaaaagactcaattttggtcagactggcgactcagagtcagttccagaccctcaacctctcggagaacctccagcagcgccctctggtgtgggacctaatacaatggctgcaggcggtggcgcaccaatggcagacaataacgaaggcgccgacggagtgggtagttcctcgggaaattggcattgcgattccacatggctgggcgacagagtcatcaccaccagcacccgaacctgggccctgcccacctacaacaaccacctctacaagcaaatctccaacgggacatcgggaggagccaccaacgacaacacctacttcggctacagcaccccctgggggtattttgactttaacagattccactgccacttttcaccacgtgactggcagcgactcatcaacaacaactggggattccggcccaagagactcagcttcaagctcttcaacatccaggtcaaggaggtcacgcagaatgaaggcaccaagaccatcgccaataacctcaccagcaccatccaggtgtttacggactcggagtaccagctgccgtacgttctcggctctgcccaccagggctgcctgcctccgttcccggcggacgtgttcatgattccccagtacggctacctaacactcaacaacggtagtcaggccgtgggacgctcctccttctactgcctggaatactttccttcgcagatgctgagaaccggcaacaacttccagtttacttacaccttcgaggacgtgcctttccacagcagctacgcccacagccagagcttggaccggctgatgaatcctctgattgaccagtacctgtactacttgtctcggactcaaacaacaggaggcacggcaaatacgcagactctgggcttcagccaaggtgggcctaatacaatggccaatcaggcaaagaactggctgccaggaccctgttaccgccaacaacgcgtctcaacgacaaccgggcaaaacaacaatagcaactttgcctggactgctgggaccaaataccatctgaatggaagaaattcattggctaatcctggcatcgctatggcaacacacaaagacgacgaggagcgtttttttcccagtaacgggatcctgatttttggcaaacaaaatgctgccagagacaatgcggattacagcgatgtcatgctcaccagcgaggaagaaatcaaaaccactaaccctgtggctacagaggaatacggtatcgtggcagataacttgcagcagcaaaacacggctcctcaaattggaactgtcaacagccagggggccttacccggtatggtctggcagaaccgggacgtgtacctgcagggtcccatctgggccaagattcctcacacggacggcaacttccacccgtctccgctgatgggcggctttggcctgaaacatcctccgcctcagatcctgatcaagaacacgcctgtacctgcggatcctccgaccaccttcaaccagtcaaagctgaactctttcatcacgcaatacagcaccggacaggtcagcgtggaaattgaatgggagctgcagaaggaaaacagcaagcgctggaaccccgagatccagtacacctccaactactacaaatctacaagtgtggactttgctgtaatacagaaggcgtgtactctgaaccccgccccattggcacccgttacctcacccgtaatctg

SEQ ID NO: 137 - DNA, 4393 bp, Adeno-associated virus 8
cagagagggagtggccaactccatcactaggggtagcgcgaagcgcctcccacgctgccgcgtcagcgctgacgtaaattacgtcataggggagtggtcctgtattagctgtcacgtgagtgcttttgcggcattttgcgacaccacgtggccatttgaggtatatatggccgagtgagcgagcaggatctccattttgaccgcgaaatttgaacgagcagcagccatgccgggcttctacgagatcgtgatcaaggtgccgagcgacctggacgagcacctgccgggcatttctgactcgtttgtgaactgggtggccgagaaggaatgggagctgcccccggattctgacatggatcggaatctgatcgagcaggcacccctgaccgtggccgagaagctgcagcgcgacttcctggtccaatggcgccgcgtgagtaaggccccggaggccctcttctttgttcagttcgagaagggcgagagctactttcacctgcacgttctggtcgagaccacgggggtcaagtccatggtgctaggccgcttcctgagtcagattcgggaaaagcttggtccagaccatctacccgcggggtcgagccccaccttgcccaactggttcgcggtgaccaaagacgcggtaatggcgccggcgggggggaacaaggtggtggacgagtgctacatccccaactacctcctgcccaagactcagcccgagctgcagtgggcgtggactaacatggaggagtatataagcgcgtgcttgaacctggccgagcgcaaacggctcgtggcgcagcacctgacccacgtcagccagacgcaggagcagaacaaggagaatctgaaccccaattctgacgcgcccgtgatcaggtcaaaaacctccgcgcgctatatggagctggtcgggtggctggtggaccggggcatcacctccgagaagcagtggatccaggaggaccaggcctcgtacatctccttcaacgccgcctccaactcgcggtcccagatcaaggccgcgctggacaatgccggcaagatcatggcgctgaccaaatccgcgcccgactacctggtggggccctcgctgcccgcggacattacccagaaccgcatctaccgcatcctcgctctcaacggctacgaccctgcctacgccggctccgtctttctcggctgggctcagaaaaagttcgggaaacgcaacaccatctggctgtttggacccgccaccaccggcaagaccaacattgcggaagccatcgcccacgccgtgcccttctacggctgcgtcaactggaccaatgagaactttcccttcaatgattgcgtcgacaagatggtgatctggtgggaggagggcaagatgacggccaaggtcgtggagtccgccaaggccattctcggcggcagcaaggtgcgcgtggaccaaaagtgcaagtcgtccgcccagatcgaccccacccccgtgatcgtcacctccaacaccaacatgtgcgccgtgattgacgggaacagcaccaccttcgagcaccagcagcctctccaggaccggatgtttaagttcgaactcacccgccgtctggagcacgactttggcaaggtgacaaagcaggaagtcaaagagttcttccgctgggccagtgatcacgtgaccgaggtggcgcatgagttttacgtcagaaagggcggagccagcaaaagacccgcccccgatgacgcggataaaagcgagcccaagcgggcctgcccctcagtcgcggatccatcgacgtcagacgcggaaggagctccggtggactttgccgacaggtaccaaaacaaatgttctcgtcacgcgggcatgcttcagatgctgtttccctgcaaaacgtgcgagagaatgaatcagaatttcaacatttgcttcacacacggggtcagagactgctcagagtgtttccccggcgtgtcagaatctcaaccggtcgtcagaaagaggacgtatcggaaactctgtgcgattcatcatctgctggggcgggctcccgagattgcttgctcggcctgcgatctggtcaacgtggacctggatgactgtgtttctgagcaataaatgacttaaaccaggtatggctgccgatggttatcttccagattggctcgaggacaacctctctgagggcattcgcgagtggtgggcgctgaaacctggagccccgaagcccaaagccaaccagcaaaagcaggacgacggccggggtctggtgcttcctggctacaagtacctcggacccttcaacggactcgacaagggggagcccgtcaacgcggcggacgcagcggccctcgagcacgacaaggcctacgaccagcagctgcaggcgggtgacaatccgtacctgcggtataaccacgccgacgccgagtttcaggagcgtctgcaagaagatacgtcttttgggggcaacctcgggcgagcagtcttccaggccaagaagcgggttctcgaacctctcggtctggttgaggaaggcgctaagacggctcctggaaagaagagaccggtagagccatcaccccagcgttctccagactcctctacgggcatcggcaagaaaggccaacagcccgccagaaaaagactcaattttggtcagactggcgactcagagtcagttccagaccctcaacctctcggagaacctccagcagcgccctctggtgtgggacctaatacaatggctgcaggcggtggcgcaccaatggcagacaataacgaaggcgccgacggagtgggtagttcctcgggaaattggcattgcgattccacatggctgggcgacagagtcatcaccaccagcacccgaacctgggccctgcccacctacaacaaccacctctacaagcaaatctccaacgggacatcgggaggagccaccaacgacaacacctacttcggctacagcaccccctgggggtattttgactttaacagattccactgccacttttcaccacgtgactggcagcgactcatcaacaacaactggggattccggcccaagagactcagcttcaagctcttcaacatccaggtcaaggaggtcacgcagaatgaaggcaccaagaccatcgccaataacctcaccagcaccatccaggtgtttacggactcggagtaccagctgccgtacgttctcggctctgcccaccagggctgcctgcctccgttcccggcggacgtgttcatgattccccagtacggctacctaacactcaacaacggtagtcaggccgtgggacgctcctccttctactgcctggaatactttccttcgcagatgctgagaaccggcaacaacttccagtttacttacaccttcgaggacgtgcctttccacagcagctacgcccacagccagagcttggaccggctgatgaatcctctgattgaccagtacctgtactacttgtctcggactcaaacaacaggaggcacggcaaatacgcagactctgggcttcagccaaggtgggcctaatacaatggccaatcaggcaaagaactggctgccaggaccctgttaccgccaacaacgcgtctcaacgacaaccgggcaaaacaacaatagcaactttgcctggactgctgggaccaaataccatctgaatggaagaaattcattggctaatcctggcatcgctatggcaacacacaaagacgacgaggagcgtttttttcccagtaacgggatcctgatttttggcaaacaaaatgctgccagagacaatgcggattacagcgatgtcatgctcaccagcgaggaagaaatcaaaaccactaaccctgtggctacagaggaatacggtatcgtggcagataacttgcagcagcaaaacacggctcctcaaattggaactgtcaacagccagggggccttacccggtatggtctggcagaaccgggacgtgtacctgcagggtcccatctgggccaagattcctcacacggacggcaacttccacccgtctccgctgatgggcggctttggcctgaaacatcctccgcctcagatcctgatcaagaacacgcctgtacctgcggatcctccgaccaccttcaaccagtcaaagctgaactctttcatcacgcaatacagcaccggacaggtcagcgtggaaattgaatgggagctgcagaaggaaaacagcaagcgctggaaccccgagatccagtacacctccaactactacaaatctacaagtgtggactttgctgttaatacagaaggcgtgtactctgaaccccgccccattggcacccgttacctcacccgtaatctgtaattgcctgttaatcaataaaccggttgattcgtttcagttgaactttggtctctgcg

SEQ ID NO: 138 - protein, 738 aa, Adeno-associated virus 8; identical to SEQ ID NO: 129

SEQ ID NO: 139 - protein, 737 aa, Adeno-associated virus 8
MAADGYLPDWLEDNLSEGIREWWALKPGAPKPKANQQKQDDGRGLVLPGYKYLGPFNGLDKGEPVNAADAAALEHDKAYDQQLQAGDNPYLRYNHADAEFQERLQEDTSFGGNLGRAVFQAKKRVLEPLGLVEEGAKTAPGKKRPVEPSPQRSPDSSTGIGKKGQQPARKRLNFGQTGDSESVPDPQPLGEPPAAPSGVGPNTMAAGGGAPMADNNEGADGVGSSSGNWHCDSTWLGDRVITTSTRTWALPTYNNHLYKQISNGTSGGATNDNTYFGYSTPWGYFDFNRFHCHFSPRDWQRLINNNWGFRPKRLSFKLFNIQVKEVTQNEGTKTIANNLTSTIQVFTDSEYQLPYVLGSAHQGCLPPFPADVFMIPQYGYLTLNNGSQAVGRSSFYCLEYFPSQMLRTGNNFQFTYTFEDVPFHSSYAHSQSLDRLMNPLIDQYLYYLSRTQTTGGTANTQTLGFSQGGPNTMANQAKNWLPGPCYRQQRVSTTTGQNNNSNFAWTAGTKYHLNGRNSLANPGIAMATHKDDEERFFPSNGILIFGKQNAARDNADYSDVMLTSEEEIKTTNPVATEEYGIVADNLQQQNTAPQIGTVNSQGALPGMVWQNRDVYLQGPIWAKIPHTDGNFHPSPLMGGFGLKHPPPQILIKNTPVPADPPTTFNQSKLNSFITQYSTGQVSVEIEWELQKENSKRWNPEIQYTSNYYKSTSVDFAVIQKACTLNPAPLAPVTSPVI

SEQ ID NO: 140 - DNA, 2217 bp, Adeno-associated virus 8; identical to SEQ ID NO: 135

SEQ ID NO: 141 - DNA, 2214 bp, Artificial Sequence
  Description of Artificial Sequence: Synthetic polypeptide
atggctgccgatggttatcttccagattggctcgaggacaacctctctgagggcattcgcgagtggtgggcgctgaaacctggagccccgaagcccaaagccaaccagcaaaagcaggacgacggccggggtctggtgcttcctggctacaagtacctcggacccttcaacggactcgacaagggggagcccgtcaacgcggcggacgcagcggccctcgagcacgacaaggcctacgaccagcagctgcaggcgggtgacaatccgtacctgcggtataaccacgccgacgccgagtttcaggagcgtctgcaagaagatacgtcttttgggggcaacctcgggcgagcagtcttccaggccaagaagcgggttctcgaacctctcggtctggttgaggaaggcgctaagacggctcctggaaagaagagaccggtagagccatcaccccagcgttctccagactcctctacgggcatcggcaagaaaggccaacagcccgccagaaaaagactcaattttggtcagactggcgactcagagtcagttccagaccctcaacctctcggagaacctccagcagcgccctctggtgtgggacctaatacaatggctgcaggcggtggcgcaccaatggcagacaataacgaaggcgccgacggagtgggtagttcctcgggaaattggcattgcgattccacatggctgggcgacagagtcatcaccaccagcacccgaacctgggccctgcccacctacaacaaccacctctacaagcaaatctccaacgggacatcgggaggagccaccaacgacaacacctacttcggctacagcaccccctgggggtattttgactttaacagattccactgccacttttcaccacgtgactggcagcgactcatcaacaacaactggggattccggcccaagagactcagcttcaagctcttcaacatccaggtcaaggaggtcacgcagaatgaaggcaccaagaccatcgccaataacctcaccagcaccatccaggtgtttacggactcggagtaccagctgccgtacgttctcggctctgcccaccagggctgcctgcctccgttcccggcggacgtgttcatgattccccagtacggctacctaacactcaacaacggtagtcaggccgtgggacgctcctccttctactgcctggaatactttccttcgcagatgctgagaaccggcaacaacttccagtttacttacaccttcgaggacgtgcctttccacagcagctacgcccacagccagagcttggaccggctgatgaatcctctgattgaccagtacctgtactacttgtctcggactcaaacaacaggaggcacggcaaatacgcagactctgggcttcagccaaggtgggcctaatacaatggccaatcaggcaaagaactggctgccaggaccctgttaccgccaacaacgcgtctcaacgacaaccgggcaaaacaacaatagcaactttgcctggactgctgggaccaaataccatctgaatggaagaaattcattggctaatcctggcatcgctatggcaacacacaaagacgacgaggagcgtttttttcccagtaacgggatcctgatttttggcaaacaaaatgctgccagagacaatgcggattacagcgatgtcatgctcaccagcgaggaagaaatcaaaaccactaaccctgtggctacagaggaatacggtatcgtggcagataacttgcctgagcggacggcgatgagtcttccgggaactgtcaacagccagggggccttacccggtatggtctggcagaaccgggacgtgtacctgcagggtcccatctgggccaagattcctcacacggacggcaacttccacccgtctccgctgatgggcggctttggcctgaaacatcctccgcctcagatcctgatcaagaacacgcctgtacctgcggatcctccgaccaccttcaaccagtcaaagctgaactctttcatcacgcaatacagcaccggacaggtcagcgtggaaattgaatgggagctgcagaaggaaaacagcaagcgctggaaccccgagatccagtacacctccaactactacaaatctacaagtgtggactttgctgttaatacagaaggcgtgtactctgaaccccgccccattggcacccgttacctcacccgtaatctg

SEQ ID NO: 142 - protein, 738 aa, Artificial Sequence
  Description of Artificial Sequence: Synthetic polypeptide
MAADGYLPDWLEDNLSEGIREWWALKPGAPKPKANQQKQDDGRGLVLPGYKYLGPFNGLDKGEPVNAADAAALEHDKAYDQQLQAGDNPYLRYNHADAEFQERLQEDTSFGGNLGRAVFQAKKRVLEPLGLVEEGAKTAPGKKRPVEPSPQRSPDSSTGIGKKGQQPARKRLNFGQTGDSESVPDPQPLGEPPAAPSGVGPNTMAAGGGAPMADNNEGADGVGSSSGNWHCDSTWLGDRVITTSTRTWALPTYNNHLYKQISNGTSGGATNDNTYFGYSTPWGYFDFNRFHCHFSPRDWQRLINNNWGFRPKRLSFKLFNIQVKEVTQNEGTKTIANNLTSTIQVFTDSEYQLPYVLGSAHQGCLPPFPADVFMIPQYGYLTLNNGSQAVGRSSFYCLEYFPSQMLRTGNNFQFTYTFEDVPFHSSYAHSQSLDRLMNPLIDQYLYYLSRTQTTGGTANTQTLGFSQGGPNTMANQAKNWLPGPCYRQQRVSTTTGQNNNSNFAWTAGTKYHLNGRNSLANPGIAMATHKDDEERFFPSNGILIFGKQNAARDNADYSDVMLTSEEEIKTTNPVATEEYGIVADNLPERTAMSLPGTVNSQGALPGMVWQNRDVYLQGPIWAKIPHTDGNFHPSPLMGGFGLKHPPPQILIKNTPVPADPPTTFNQSKLNSFITQYSTGQVSVEIEWELQKENSKRWNPEIQYTSNYYKSTSVDFAVNTEGVYSEPRPIGTRYLTRNL

SEQ ID NO: 143 - DNA, 2214 bp, Artificial Sequence
  Description of Artificial Sequence: Synthetic polynucleotide
atggctgccgatggttatcttccagattggctcgaggacaacctctctgagggcattcgcgagtggtgggcgctgaaacctggagccccgaagcccaaagccaaccagcaaaagcaggacgacggccggggtctggtgcttcctggctacaagtacctcggacccttcaacggactcgacaagggggagcccgtcaacgcggcggacgcagcggccctcgagcacgacaaggcctacgaccagcagctgcaggcgggtgacaatccgtacctgcggtataaccacgccgacgccgagtttcaggagcgtctgcaagaagatacgtcttttgggggcaacctcgggcgagcagtcttccaggccaagaagcgggttctcgaacctctcggtctggttgaggaaggcgctaagacggctcctggaaagaagagaccggtagagccatcaccccagcgttctccagactcctctacgggcatcggcaagaaaggccaacagcccgccagaaaaagactcaattttggtcagactggcgactcagagtcagttccagaccctcaacctctcggagaacctccagcagcgccctctggtgtgggacctaatacaatggctgcaggcggtggcgcaccaatggcagacaataacgaaggcgccgacggagtgggtagttcctcgggaaattggcattgcgattccacatggctgggcgacagagtcatcaccaccagcacccgaacctgggccctgcccacctacaacaaccacctctacaagcaaatctccaacgggacatcgggaggagccaccaacgacaacacctacttcggctacagcaccccctgggggtattttgactttaacagattccactgccacttttcaccacgtgactggcagcgactcatcaacaacaactggggattccggcccaagagactcagcttcaagctcttcaacatccaggtcaaggaggtcacgcagaatgaaggcaccaagaccatcgccaataacctcaccagcaccatccaggtgtttacggactcggagtaccagctgccgtacgttctcggctctgcccaccagggctgcctgcctccgttcccggcggacgtgttcatgattccccagtacggctacctaacactcaacaacggtagtcaggccgtgggacgctcctccttctactgcctggaatactttccttcgcagatgctgagaaccggcaacaacttccagtttacttacaccttcgaggacgtgcctttccacagcagctacgcccacagccagagcttggaccggctgatgaatcctctgattgaccagtacctgtactacttgtctcggactcaaacaacaggaggcacggcaaatacgcagactctgggcttcagccaaggtgggcctaatacaatggccaatcaggcaaagaactggctgccaggaccctgttaccgccaacaacgcgtctcaacgacaaccgggcaaaacaacaatagcaactttgcctggactgctgggaccaaataccatctgaatggaagaaattcattggctaatcctggcatcgctatggcaacacacaaagacgacgaggagcgtttttttcccagtaacgggatcctgatttttggcaaacaaaatgctgccagagacaatgcggattacagcgatgtcatgctcaccagcgaggaagaaatcaaaaccactaaccctgtggctacagaggaatacggtatcgtggcagataacttgagttttagtcgtgcggttctttgtgatggaactgtcaacagccagggggccttacccggtatggtctggcagaaccgggacgtgtacctgcagggtcccatctgggccaagattcctcacacggacggcaacttccacccgtctccgctgatgggcggctttggcctgaaacatcctccgcctcagatcctgatcaagaacacgcctgtacctgcggatcctccgaccaccttcaaccagtcaaagctgaactctttcatcacgcaatacagcaccggacaggtcagcgtggaaattgaatgggagctgcagaaggaaaacagcaagcgctggaaccccgagatccagtacacctccaactactacaaatctacaagtgtggactttgctgttaatacagaaggcgtgtactctgaaccccgccccattggcacccgttacctcacccgtaatctg

SEQ ID NO: 144 - protein, 738 aa, Artificial Sequence
  Description of Artificial Sequence: Synthetic polypeptide
MAADGYLPDWLEDNLSEGIREWWALKPGAPKPKANQQKQDDGRGLVLPGYKYLGPFNGLDKGEPVNAADAAALEHDKAYDQQLQAGDNPYLRYNHADAEFQERLQEDTSFGGNLGRAVFQAKKRVLEPLGLVEEGAKTAPGKKRPVEPSPQRSPDSSTGIGKKGQQPARKRLNFGQTGDSESVPDPQPLGEPPAAPSGVGPNTMAAGGGAPMADNNEGADGVGSSSGNWHCDSTWLGDRVITTSTRTWALPTYNNHLYKQISNGTSGGATNDNTYFGYSTPWGYFDFNRFHCHFSPRDWQRLINNNWGFRPKRLSFKLFNIQVKEVTQNEGTKTIANNLTSTIQVFTDSEYQLPYVLGSAHQGCLPPFPADVFMIPQYGYLTLNNGSQAVGRSSFYCLEYFPSQMLRTGNNFQFTYTFEDVPFHSSYAHSQSLDRLMNPLIDQYLYYLSRTQTTGGTANTQTLGFSQGGPNTMANQAKNWLPGPCYRQQRVSTTTGQNNNSNFAWTAGTKYHLNGRNSLANPGIAMATHKDDEERFFPSNGILIFGKQNAARDNADYSDVMLTSEEEIKTTNPVATEEYGIVADNLSFSRAVLCDGTVNSQGALPGMVWQNRDVYLQGPIWAKIPHTDGNFHPSPLMGGFGLKHPPPQILIKNTPVPADPPTTFNQSKLNSFITQYSTGQVSVEIEWELQKENSKRWNPEIQYTSNYYKSTSVDFAVNTEGVYSEPRPIGTRYLTRNL

SEQ ID NO: 145 - DNA, 4385 bp, Adeno-associated virus 9
cagagagggagtggccaactccatcactaggggtaatcgcgaagcgcctcccacgctgccgcgtcagcgctgacgtagattacgtcataggggagtggtcctgtattagctgtcacgtgagtgcttttgcgacattttgcgacaccacatggccatttgaggtatatatggccgagtgagcgagcaggatctccattttgaccgcgaaatttgaacgagcagcagccatgccgggcttctacgagattgtgatcaaggtgccgagcgacctggacgagcacctgccgggcatttctgactcttttgtgaactgggtggccgagaaggaatgggagctgcccccggattctgacatggatcggaatctgatcgagcaggcacccctgaccgtggccgagaagctgcagcgcgacttcctggtccaatggcgccgcgtgagtaaggccccggaggccctcttctttgttcagttcgagaagggcgagagctactttcacctgcacgttctggtcgagaccacgggggtcaagtccatggtgctaggccgcttcctgagtcagattcgggagaagctggtccagaccatctaccgcgggatcgagccgaccctgcccaactggttcgcggtgaccaagacgcgtaatggcgccggcggggggaacaaggtggtggacgagtgctacatccccaactacctcctgcccaagactcagcccgagctgcagtgggcgtggactaacatggaggagtatataagcgcgtgcttgaacctggccgagcgcaaacggctcgtggcgcagcacctgacccacgtcagccagacgcaggagcagaacaaggagaatctgaaccccaattctgacgcgcccgtgatcaggtcaaaaacctccgcgcgctacatggagctggtcgggtggctggtggaccggggcatcacctccgagaagcagtggatccaggaggaccaggcctcgtacatctccttcaacgccgcctccaactcgcggtcccagatcaaggccgcgctggacaatgccggcaagatcatggcgctgaccaaatccgcgcccgactacctggtaggcccttcacttccggtggacattacgcagaaccgcatctaccgcatcctgcagctcaacggctacgaccctgcctacgccggctccgtctttctcggctgggcacaaaagaagttcgggaaacgcaacaccatctggctgtttgggccggccaccacgggaaagaccaacatcgcagaagccattgcccacgccgtgcccttctacggctgcgtcaactggaccaatgagaactttcccttcaacgattgcgtcgacaagatggtgatctggtgggaggagggcaagatgacggccaaggtcgtggagtccgccaaggccattctcggcggcagcaaggtgcgcgtggaccaaaagtgcaagtcgtccgcccagatcgaccccactcccgtgatcgtcacctccaacaccaacatgtgcgccgtgattgacgggaacagcaccaccttcgagcaccagcagcctctccaggaccggatgtttaagttcgaactcacccgccgtctggagcacgactttggcaaggtgacaaagcaggaagtcaaagagttcttccgctgggccagtgatcacgtgaccgaggtggcgcatgagttttacgtcagaaagggcggagccagcaaaagacccgcccccgatgacgcggataaaagcgagcccaagcgggcctgcccctcagtcgcggatccatcgacgtcagacgcggaaggagctccggtggactttgccgacaggtaccaaaacaaatgttctcgtcacgcgggcatgcttcagatgctgcttccctgcaaaacgtgcgagagaatgaatcagaatttcaacatttgcttcacacacggggtcagagactgctcagagtgtttccccggcgtgtcagaatctcaaccggtcgtcagaaagaggacgtatcggaaactctgtgcgattcatcatctgctggggcgggctcccgagattgcttgctcggcctgcgatctggtcaacgtggacctggatgactgtgtttctgagcaataaatgacttaaaccaggtatggctgccgatggttatcttccagattggctcgaggacaacctctctgagggcattcgcgagtggtgggcgctgaaacctggagccccgaagcccaaagccaaccagcaaaagcaggacgacggccggggtctggtgcttcctggctacaagtacctcggacccttcaacggactcgacaagggggagcccgtcaacgcggcggacgcagcggccctcgagcacggcaaggcctacgaccagcagctgcaggcgggtgacaatccgtacctgcggtataaccacgccgacgccgagtttcaggagcgtctgcaagaagatacgtcttttgggggcaacctcgggcgagcagtcttccaggccaagaagcgggttctcgaacctctcggtctggttgaggaaggcgctaagacggctcctggaaagaagagaccggtagagccatcaccccagcgttctccagactcctctacgggcatcggcaagaaaggccaacagcccgccagaaaaagactcaattttggtcagactggcgactcagagtcagttccagaccctcaacctctcggagaacctccagcagcgccctctggtgtgggacctaatacaatggctgcaggcggtggcgcaccaatggcagacaataacgaaggcgccgacggagtgggtaattcctcgggaaattggcattgcgattccacatggctgggggacagagtcatcaccaccagcacccgaacctgggcattgcccacctacaacaaccacctctacaagcaaatctccaatggaacatcgggaggaagcaccaacgacaacacctactttggctacagcaccccctgggggtattttgacttcaacagattccactgccacttctcaccacgtgactggcagcgactcatcaacaacaactggggattccggccaaagagactcaacttcaagctgttcaacatccaggtcaaggaggttacgacgaacgaaggcaccaagaccatcgccaataaccttaccagcaccgtccaggtctttacggactcggagtaccagctaccgtacgtcctaggctctgcccaccaaggatgcctgccaccgtttcctgcagacgtcttcatggttcctcagtacggctacctgacgctcaacaatggaagtcaagcgttaggacgttcttctttctactgtctggaatacttcccttctcagatgctgagaaccggcaacaactttcagttcagctacactttcgaggacgtgcctttccacagcagctacgcacacagccagagtctagatcgactgatgaaccccctcatcgaccagtacctatactacctggtcagaacacagacaactggaactgggggaactcaaactttggcattcagccaagcaggccctagctcaatggccaatcaggctagaaactgggtacccgggccttgctaccgtcagcagcgcgtctccacaaccaccaaccaaaataacaacagcaactttgcgtggacgggagctgctaaattcaagctgaacgggagagactcgctaatgaatcctggcgtggctatggcatcgcacaaagacgacgaggaccgcttctttccatcaagtggcgttctcatatttggcaagcaaggagccgggaacgatggagtcgactacagccaggtgctgattacagatgaggaagaaattaaagccaccaaccctgtagccacagaggaatacggagcagtggccatcaacaaccaggccgctaacacgcaggcgcaaactggacttgtgcataaccagggagttattcctggtatggtctggcagaaccgggacgtgtacctgcagggccctatttgggctaaaatacctcacacagatggcaactttcacccgtctcctctgatgggtggatttggactgaaacacccacctccacagattctaattaaaaatacaccagtgccggcagatcctcctcttaccttcaatcaagccaagctgaactctttcatcacgcagtacagcacgggacaagtcagcgtggaaatcgagtgggagctgcagaaagaaaacagcaagcgctggaatccagagatccagtatacttcaaactactacaaatctacaaatgtggactttgctgtcaataccaaaggtgtttactctgagcctcgccccattggtactcgttacctcacccgtaatttgtaattgcctgttaatcaataaaccggttaattcgtttcagttgaactttggtctctgcg

SEQ ID NO: 146 - DNA, 4382 bp, Adeno-associated virus 9
cagagagggagtggccaactccatcactaggggtaatcgcgaagcgcctcccacgctgccgcgtcagcgctgacgtagattacgtcataggggagtggtcctgtattagctgtcacgtgagtgcttttgcgacattttgcgacaccacatggccatttgaggtatatatggccgagtgagcgagcaggatctccattttgaccgcgaaatttgaacgagcagcagccatgccgggcttctacgagattgtgatcaaggtgccgagcgacctggacgagcacctgccgggcatttctgactcttttgtgaactgggtggccgagaaggaatgggagctgcccccggattctgacatggatcggaatctgatcgagcaggcacccctgaccgtggccgagaagctgtagcgcgacttcctggtccaatggcgccgcgtgagtaaggccccggaggccctcttctttgttcagttcgagaagggcgagagctactttcacctgcacgttctggtcgagaccacgggggtcaagtccatggtgctaggccgcttcctgagtcagattcgggagaagctggtccagaccatctaccgcgggatcgagccgaccctgcccaactggttcgcggtgaccaagacgcgtaatggcgccggcggggggaacaaggtggtggacgagtgctacatccccaactacctcctgcccaagactcagcccgagctgcagtgggcgtggactaacatggaggagtatataagcgcgtgcttgaacctggccgagcgcaaacggctcgtggcgcagcacctgacccacgtcagccagacgcaggagcagaacaaggagaatctgaaccccaattctgacgcgcccgtgatcaggtcaaaaacctccgcgcgctacatggagctggtcgggtggctggtggaccggggcatcacctccgagaagcagtggatccaggaggaccaggcctcgtacatctccttcaacgccgcctccaactcgcggtcccagatcaaggccgcgctggacaatgccggcaagatcatggcgctgaccaaatccgcgcccgactacctggtaggcccttcacttccggtggacattacgcagaaccgcatctaccgcatcctgcagctcaacggctacgaccctgcctacgccggctccgtctttctcggctgggcacaaaagaagttcgggaaacgcaacaccatctggctgtttgggccggccaccacgggaaagaccaacatcgcagaagccattgcccacgccgtgcccttctacggctgcgtcaactggaccaatgagaactttcccttcaacgattgcgtcgacaagatggtgatctggtgggaggagggcaagatgacggccaaggtcgtggagtccgccaaggccattctcggcggcagcaaggtgcgcgtggaccaaaagtgcaagtcgtccgcccagatcgaccccactcccgtgatcgtcacctccaacaccaacatgtgcgccgtgattgacgggaacagcaccaccttcgagcaccagcagcctctccaggaccggatgtttaagttcgaactcacccgccgtctggagcacgactttggcaaggtgacaaagcaggaagtcaaagagttcttccgctgggccagtgatcacgtgaccgaggtggcgcatgagttttacgtcagaaagggcggagccagcaaaagacccgcccccgatgacgcggataaaagcgagcccaagcgggcctgcccctcagtcgcggatccatcgacgtcagacgcggaaggagctccggtggactttgccgacaggtaccaaaacaaatgttctcgtcacgcgggcatgcttcagatgctgcttccctgcaaaacgtgcgagagaatgaatcagaatttcaacatttgcttcacacacggggtcagagactgctcagagtgtttccccggcgtgtcagaatctcaaccggtcgtcagaaagaggacgtatcggaaactctgtgcgattcatcatctgctggggcgggctcccgagattgcttgctcggcctgcgatctggtcaacgtggacctggatgactgtgtttctgagcaataaatgacttaaaccaggtatggctgccgatggttatcttccagattggctcgaggacaacctctctgagggcattcgcgagtggtgggacctgaaacctggagccccgaaacccaaagccaaccagcaaaagcaggacgacggccggggtctggtgcttcctggctacaagtacctcggacccttcaacggactcgacaagggggagcccgtcaacgcggcggacgcagcggccctcgagcacgacaaggcctacgaccagcagctcaaagcgggtgacaatccgtacctgcggtataaccacgccgacgccgagtttcaggagcgtctgcaagaagatacgtcttttgggggcaacctcgggcgagcagtcttccaggccaagaagcgggttctcgaacctctcggtctggttgaggaaggcgctaagacggctcctggaaagaagagaccggtagagcagtcaccccaagaaccagactcatcctcgggcatcggcaaatcaggccagcagcccgctaaaaagagactcaattttggtcagactggcgactcagagtcagtccccgacccacaacctctcggagaacctccagaagccccctcaggtctgggacctaatacaatggcttcaggcggtggcgctccaatggcagacaataacgaaggcgccgacggagtgggtaattcctcgggaaattggcattgcgattccacatggctgggggacagagtcatcaccaccagcacccgaacctgggcattgcccacctacaacaaccacctctacaagcaaatctccaatggaacatcgggaggaagcaccaacgacaacacctactttggctacagcaccccctgggggtattttgacttcaacagattccactgccacttctcaccacgtgactggcagcgactcatcaacaacaactggggattccggccaaagagactcaacttcaagctgttcaacatccaggtcaaggaggttacgacgaacgaaggcaccaagaccatcgccaataaccttaccagcaccgtccaggtctttacggactcggagtaccagctaccgtacgtcctaggctctgcccaccaaggatgcctgccaccgtttcctgcagacgtcttcatggttcctcagtacggctacctgacgctcaacaatggaagtcaagcgttaggacgttcttctttctactgtctggaatacttcccttctcagatgctgagaaccggcaacaactttcagttcagctacactttcgaggacgtgcctttccacagcagctacgcacacagccagagtctagatcgactgatgaaccccctcatcgaccagtacctatactacctggtcagaacacagacaactggaactgggggaactcaaactttggcattcagccaagcaggccctagctcaatggccaatcaggctagaaactgggtacccgggccttgctaccgtcagcagcgcgtctccacaaccaccaaccaaaataacaacagcaactttgcgtggacgggagctgctaaattcaagctgaacgggagagactcgctaatgaatcctggcgtggctatggcatcgcacaaagacgacgaggaccgcttctttccatcaagtggcgttctcatatttggcaagcaaggagccgggaacgatggagtcgactacagccaggtgctgattacagatgaggaagaaattaaagccaccaaccctgtagccacagaggaatacggagcagtggccatcaacaaccaggccgctaacacgcaggcgcaaactggacttgtgcataaccagggagttattcctggtatggtctggcagaaccgggacgtgtacctgcagggccctatttgggctaaaatacctcacacagatggcaactttcacccgtctcctctgatgggtggatttggactgaaacacccacctccacagattctaattaaaaatacaccagtgccggcagatcctcctcttaccttcaatcaagccaagctgaactctttcatcacgcagtacagcacgggacaagtcagcgtggaaatcgagtgggagctgcagaaagaaaacagcaagcgctggaatccagagatccagtatacttcaaactactacaaatctacaaatgtggactttgctgtcaataccgaaggtgtttactctgagcctcgccccattggtactcgttacctcacccgtaatttgtaattgcctgttaatcaataaaccggttaattcgtttcagttgaactttggtctctgcg

SEQ ID NO: 147 - protein, 736 aa, Adeno-associated virus 9
MAADGYLPDWLEDNLSEGIREWWALKPGAPQPKANQQHQDNARGLVLPGYKYLGPGNGLDKGEPVNAADAAALEHDKAYDQQLKAGDNPYLKYNHADAEFQERLKEDTSFGGNLGRAVFQAKKRLLEPLGLVEEAAKTAPGKKRPVEQSPQEPDSSAGIGKSGAQPAKKRLNFGQTGDTESVPDPQPIGEPPAAPSGVGSLTMASGGGAPVADNNEGADGVGSSSGNWHCDSQWLGDRVITTSTRTWALPTYNNHLYKQISNSTSGGSSNDNAYFGYSTPWGYFDFNRFHCHFSPRDWQRLINNNWGFRPKRLNFKLFNIQVKEVTDNNGVKTIANNLTSTVQVFTDSDYQLPYVLGSAHEGCLPPFPADVFMIPQYGYLTLNDGSQAVGRSSFYCLEYFPSQMLRTGNNFQFSYEFENVPFHSSYAHSQSLDRLMNPLIDQYLYYLSKTINGSGQNQQTLKFSVAGPSNMAVQGRNYIPGPSYRQQRVSTTVTQNNNSEFAWPGASSWALNGRNSLMNPGPAMASHKEGEDRFFPLSGSLIFGKQGTGRDNVDADKVMITNEEEIKTTNPVATESYGQVATNHQSAQAQAQTGWVQNQGILPGMVWQDRDVYLQGPIWAKIPHTDGNFHPSPLMGGFGMKHPPPQILIKNTPVPADPPTAFNKDKLNSFITQYSTGQVSVEIEWELQKENSKRWNPEIQYTSNYYKSNNVEFAVNTEGVYSEPRPIGTRYLTRNL

SEQ ID NO: 148 - protein, 736 aa, Adeno-associated virus 9
MAADGYLPDWLEDNLSEGIREWWDLKPGAPKPKANQQKQDDGRGLVLPGYKYLGPFNGLDKGEPVNAADAAALEHDKAYDQQLKAGDNPYLRYNHADAEFQERLQEDTSFGGNLGRAVFQAKKRVLEPLGLVEEGAKTAPGKKRPVEQSPQEPDSSSGIGKSGQQPAKKRLNFGQTGDSESVPDPQPLGEPPEAPSGLGPNTMASGGGAPMADNNEGADGVGNSSGNWHCDSTWLGDRVITTSTRTWALPTYNNHLYKQISNGTSGGSTNDNTYFGYSTPWGYFDFNRFHCHFSPRDWQRLINNNWGFRPKRLNFKLFNIQVKEVTTNEGTKTIANNLTSTVQVFTDSEYQLPYVLGSAHQGCLPPFPADVFMVPQYGYLTLNNGSQALGRSSFYCLEYFPSQMLRTGNNFQFSYTFEDVPFHSSYAHSQSLDRLMNPLIDQYLYYLVRTQTTGTGGTQTLAFSQAGPSSMANQARNWVPGPCYRQQRVSTTTNQNNNSNFAWTGAAKFKLNGRDSLMNPGVAMASHKDDEDRFFPSSGVLIFGKQGAGNDGVDYSQVLITDEEEIKATNPVATEEYGAVAINNQAANTQAQTGLVHNQGVIPGMVWQNRDVYLQGPIWAKIPHTDGNFHPSPLMGGFGLKHPPPQILIKNTPVPADPPLTFNQAKLNSFITQYSTGQVSVEIEWELQKENSKRWNPEIQYTSNYYKSTNVDFAVNTEGVYSEPRPIGTRYLTRNL

SEQ ID NO: 149 - protein, 623 aa, Adeno-associated virus 9
MPGFYEIVIKVPSDLDEHLPGISDSFVNWVAEKEWELPPDSDMDRNLIEQAPLTVAEKLQRDFLVQWRRVSKAPEALFFVQFEKGESYFHLHVLVETTGVKSMVLGRFLSQIREKLVQTIYRGIEPTLPNWFAVTKTRNGAGGGNKVVDECYIPNYLLPKTQPELQWAWTNMEEYISACLNLAERKRLVAQHLTHVSQTQEQNKENLNPNSDAPVIRSKTSARYMELVGWLVDRGITSEKQWIQEDQASYISFNAASNSRSQIKAALDNAGKIMALTKSAPDYLVGPSLPVDITQNRIYRILQLNGYDPAYAGSVFLGWAQKKFGKRNTIWLFGPATTGKTNIAEAIAHAVPFYGCVNWTNENFPFNDCVDKMVIWWEEGKMTAKVVESAKAILGGSKVRVDQKCKSSAQIDPTPVIVTSNTNMCAVIDGNSTTFEHQQPLQDRMFKFELTRRLEHDFGKVTKQEVKEFFRWASDHVTEVAHEFYVRKGGASKRPAPDDADKSEPKRACPSVADPSTSDAEGAPVDFADRYQNKCSRHAGMLQMLLPCKTCERMNQNFNICFTHGVRDCSECFPGVSESQPVVRKRTYRKLCAIHHLLGRAPEIACSACDLVNVDLDDCVSEQ

SEQ ID NO: 150 - DNA, 2211 bp, Adeno-associated virus
atggctgccgatggttatcttccagattggctcgaggacaaccttagtgaaggaattcgcgagtggtgggctttgaaacctggagcccctcaacccaaggcaaatcaacaacatcaagacaacgctcgaggtcttgtgcttccgggttacaaataccttggacccggcaacggactcgacaagggggagccggtcaacgcagcagacgcggcggccctcgagcacgacaaggcctacgaccagcagctcaaggccggagacaacccgtacctcaagtacaaccacgccgacgccgagttccaggagcggctcaaagaagatacgtcttttgggggcaacctcgggcgagcagtcttccaggccaaaaagaggcttcttgaacctcttggtctggttgaggaagcggctaagacggctcctggaaagaagaggcctgtagagcagtctcctcaggaaccggactcctccgcgggtattggcaaatcgggtgcacagcccgctaaaaagagactcaatttcggtcagactggcgacacagagtcagtcccagaccctcaaccaatcggagaacctcccgcagccccctcaggtgtgggatctcttacaatggcttcaggtggtggcgcaccagtggcagacaataacgaaggtgccgatggagtgggtagttcctcgggaaattggcattgcgattcccaatggctgggggacagagtcatcaccaccagcacccgaacctgggccctgcccacctacaacaatcacctctacaagcaaatctccaacagcacatctggaggatcttcaaatgacaacgcctacttcggctacagcaccccctgggggtattttgacttcaacagattccactgccacttctcaccacgtgactggcagcgactcatcaacaacaactggggattccggcctaagcgactcaacttcaagctcttcaacattcaggtcaaagaggttacggacaacaatggagtcaagaccatcgccaataaccttaccagcacggtccaggtcttcacggactcagactatcagctcccgtacgtgctcgggtcggctcacgagggctgcctcccgccgttcccagcggacgttttcatgattcctcagtacgggtatctgacgcttaatgatggaagccaggccgtgggtcgttcgtccttttactgcctggaatatttcccgtcgcaaatgctaagaacgggtaacaacttccagttcagctacgagtttgagaacgtacctttccatagcagctacgctcacagccaaagcctggaccgactaatgaatccactcatcgaccaatacttgtactatctctcaaagactattaacggttctggacagaatcaacaaacgctaaaattcagtgtggccggacccagcaacatggctgtccagggaagaaactacatacctggacccagctaccgacaacaacgtgtctcaaccactgtgactcaaaacaacaacagcgaatttgcttggcctggagcttcttcttgggctctcaatggacgtaatagcttgatgaatcctggacctgctatggccagccacaaagaaggagaggaccgtttctttcctttgtctggatctttaatttttggcaaacaaggaactggaagagacaacgtggatgcggacaaagtcatgataaccaacgaagaagaaattaaaactactaacccggtagcaacggagtcctatggacaagtggccacaaaccaccagagtgcccaagcacaggcgcagaccggctgggttcaaaaccaaggaatacttccgggtatggtttggcaggacagagatgtgtacctgcaaggacccatttgggccaaaattcctcacacggacggcaactttcacccttctccgctgatgggagggtttggaatgaagcacccgcctcctcagatcctcatcaaaaacacacctgtacctgcggatcctccaacggccttcaacaaggacaagctgaactctttcatcacccagtattctactggccaagtcagcgtggagatcgagtgggagctgcagaaggaaaacagcaagcgctggaacccggagatccagtacacttccaactattacaagtctaataatgttgaatttgctgttaatactgaaggtgtatatagtgaaccccgccccattggcaccagatacctgactcgtaatctgtaa

SEQ ID NO: 151 - protein, 736 aa, Adeno-associated virus; identical to SEQ ID NO: 147

SEQ ID NO: 152 - DNA, 2460 bp, Adeno-associated virus
ggtaattcctccggaaattggcattgcgattccacatggctgggcgaccgagtcattaccaccagcacccggacttgggccctgcccacctacaacaaccacctctacaagcaaatctccagccaatcgggtgccaccaacgacaaccactacttcggctacagcaccccttgggggtattttgatttcaacagattccactgccatttctcaccacgtgactggcagcgactcatcaacaacaactggggattcatggctgccgatggttatcttccagattggctcgaggacactctctctgaaggaatcagacagtggtggaagctcaaacctggcccaccaccgccgaaacctaaccaacaacaccgggacgacagtaggggtcttgtgcttcctgggtacaagtacctcggacccttcaacggactcgacaaaggagagccggtcaacgaggcagacgccgcggccctcgagcacgacaaagcctacgaccaccagctcaagcaaggggacaacccgtacctcaaatacaaccacgcggacgctgaatttcaggagcgtcttcaagaagatacgtctttcgggggcaacctcgggcgagcagtcttccaggccaaaaagagggtactcgagcctcttggtctggttgaggaagctgttaagacggctcctggaaaaaagagacctatagagcagtctcctgcagaaccggactcttcctcgggcatcggcaaatcaggccagcagcccgctaagaaaagactcaattttggtcagactggcgacacagagtcagtcccagaccctcaaccaatcggagaaccccccgcagccccctctggtgtgggatctaatacaatggcttcaggcggtggggcaccaatggcagacaataacgaaggcgccgacggagtgggtaattcctcgggaaattggcattgcgattccacatggatgggcgacagagttatcaccaccagcacaagaacctgggccctccccacctacaataatcacctctacaagcaaatctccagcgaatcgggagccaccaacgacaaccactacttcggctacagcaccccctgggggtattttgactttaacagattccactgtcacttctcaccacgtgactggcagcgactcatcaacaacaactggggatttagacccaagaaactcaatttcaagctcttcaacatccaagtcaaggaggtcacgcagaatgatggaaccacgaccatcgccaataaccttaccagcacggtgcaggtcttcacagactctgagtaccagctgccctacgtcctcggttcggctcaccagggctgccttccgccgttcccagcagacgtcttcatgattcctcagtacggctacttgactctgaacaatggcagccaagcggtaggacgttcttcattctactgtctagagtattttccctctcagatgctgaggacgggaaacaacttcaccttcagctacacttttgaagacgtgcctttccacagcagctacgcgcacagccagagtctggatcggctgatgaatcctctcattgaccagtacctgtattacctgagcaaaactcagggtacaagtggaacaacgcagcaatcgagactgcagttcagccaagctgggcctagctccatggctcagcaggccaaaaactggctaccgggacccagctaccgacagcagcgaatgtctaagacggctaatgacaacaacaacagtgaatttgcttggactgcagccaccaaatattacctgaatggaagaaattctctggtcaatcccgggcccccaatggccagtcacaaggacgatgaggaaaagtatttccccatgcacggaaatctcatctttggaaaacaaggcacaggaactaccaatgtggacattgaatcagtgcttattacagacgaagaagaaatcagaacaactaatcctgtggctacagaacaatacggacaggttgccaccaaccatcagagtcagaacaccacagcttcctatggaagtgtggacagccagggaatcttacctggaatggtgtggcaggaccgcgatgtctatcttcaaggtcccatttgggccaaaactcctcacacggacggacactttcatccttctccgctcatgggaggctttggactgaaacaccctcctccccagatcctgatcaaaaacacacctgtgccagcgaatcccgcgaccactttcactcctggaaagtttgcttcgttcattacccagtattccaccggacaggtcagcgtggaaatagagtgggagctgcagaaagaaaacagcaaacgctggaacccagaaattcagtacacctccaactacaacaagtcggtgaatgtggagtttaccgtggacgcaaacggtgtttattctgaaccccgccctattggcactcgttaccttacccggaacttg

SEQ ID NO: 153 - DNA, 3123 bp, Adeno-associated virus
gaattcgccctttctacggctgcgtcaactggaccaatgaaaactttcccttcaacgattgcgtcgacaagatggtgatctggtgggaggagggaaagatgaccgccaaggtcgtggaatctgccaaagccattctgggtggaggcaaggttcgtgtggaccagaaatgcaagtcttcggcccagatcgacccgactccggtgattgtcacctctaacaccaacatgtgcgccgtgattgacggaaactcgaccaccttcgagcaccagcagccgttgcaagaccggatgttcaaatttgaacttacccgccgtttggatcatgactttgggaaggtcaccaagcaggaagtcaaagactttttccggtgggctcaagatcacgtgactgaggtggagcatgagttctacgtcaaaaagggtggagccaagaaaaggcccgcccccgatgatgtatatataaatgagcccaagcgggcgcgcgagtcagttgcgcagccatcgacgtcagacgcggaagcttcgataaactacgcggacaggtaccaaaacaaatgttctcgtcacgtgggcatgaatctgatgctgtttccctgtcgacaatgcgaaagaatgaatcagaattcaaatatctgcttcacacacgggcaaaaagactgtttggaatgctttcccgtgtcagaatctcaacccgtttctgtcgtcagaaaaacgtatcagaaactttgttacattcatcatatcatgggaaaagtaccagacgcctgcactgcctgcgacctggtaaatgtggacttggatgactgtatttctgagcaataaatgacttaaatcaggtatggctgctgacggttatcttccagattggctcgaggacactctctctgaaggaatcagacagtggtggaagctcaaacctggcccaccaccgccgaaacctaaccaacaacaccgggacgacagtaggggtcttgtgcttcctgggtacaagtacctcggacccttcaacggactcgacaaaggagagccggtcaacgaggcagacgccgcggccctcgagcacgacaaagcctacgaccaccagctcaagcaaggggacaacccgtacctcaaatacaaccacgcggacgctgaatttcaggagcgtcttcaagaagatacgtctttcgggggcaacctcgggcgagcagtcttccaggccaaaaagagggtactcgagcctcttggtctggttgaggaagctgttaagacggctcctggaaaaaagagacctatagagcagtctcctgcagaaccggactcttcctcgggcatcggcaaatcaggccagcagcccgctaagaaaagactcaattttggtcagactggcgacacagagtcagtcccaggccctcaaccaatcggagaaccccccgcagccccctctggtgtgggatctaatacaatggcttcaggcggtggggcaccaatggcagacaataacgaaggcgccgacggagtgggtaattcctcgggaaattggcattgcgattccacatggatgggcgacagagttatcaccaccagcacaagaacctgggccctccccacctacaataatcacctctacaagcaaatctccagcgaatcgggagccaccaacgacaaccactacttcggctacagcaccccctgggggtattttgactttaacagattccactgtcacttctcaccacgtgactggcagcgactcatcaacaacaactggggatttagacccaagaaactcaatttcaagctcttcaacatccaagtcaaggaggtcacgcagaatgatggaaccacgaccatcgccaataaccttaccagcgcggtgcaggtcttcacagactctgagtaccagctgccctacgtcctcggttcggctcaccagggctgccttccgccgttcccagcagacgtcttcatgattcctcagtacggctacttgactctgaacaatggcagccaagcggtaggacgttcttcattctactgtctagagtattttccctctcagatgctgaggacgggaaacaacttcaccttcagctacacttttgaagacgtgcctttccacagcagctacgcgcacagccagagtctggatcggctgatgaatcctctcattgaccagtacctgtattacctgagcaaaactcagggtacaagtggaacaacgcagcaatcgagactgcagttcagccaagctgggcctagctccatggctcagcaggccaaaaactggctaccgggacccagctaccgacagcagcgaatgtctaagacggctaatgacaacaacaacagtgaatttgcttggactgcagccaccaaatattacctgaatggaagaaattctctggtcaatcccgggcccccagtggccagtcacaaggacgatgaggaaaagtatttccccatgcacggaaatctcatctttggaaaacaaggcacaggaactaccaatgtggacattgaatcagtgcttattacagacgaagaagaaatcagaacaactaatcctgtggctacagaacaatacggacaggttgccaccaaccatcagagtcagaacaccacagcttcctatggaagtgtggacagccagggaatcttacctggaatggtgtggcaggaccgcgatgtctatcttcaaggtcccatttgggccaaaactcctcacacggacggacactttcatccttctccgctcatgggaggctttggactgaaacaccctcctccccagatcctgatcaaaaacacacctgtgccagcgaatcccgcgaccactttcactcctggaaagtttgcttcgttcattacccagtattccacctgacaggtcagcgtggaaatagagtgggagctgcagaaagaaaacagcaaacgctggaacccagaaattcagtacacctccaactacaacaagtcggtgaatgtggagtttaccgtggacgcaaacggtgtttattctgaaccccgccctattggcactcgttaccttacccggaacttgtaatttcctgttaatgaataagccgatttatgcgtttcagttgaactttggtctctgcgaagggcgaattcgtttaaacct

SEQ ID NO: 154 - protein, 735 aa, Adeno-associated virus
MAADGYLPDWLEDTLSEGIRQWWKLKPGPPPPKPNQQHRDDSRGLVLPGYKYLGPFNGLDKGEPVNEADAAALEHDKAYDHQLKQGDNPYLKYNHADAEFQERLQEDTSFGGNLGRAVFQAKKRVLEPLGLVEEAVKTAPGKKRPIEQSPAEPDSSSGIGKSGQQPAKKRLNFGQTGDTESVPGPQPIGEPPAAPSGVGSNTMASGGGAPMADNNEGADGVGNSSGNWHCDSTWMGDRVITTSTRTWALPTYNNHLYKQISSESGATNDNHYFGYSTPWGYFDFNRFHCHFSPRDWQRLINNNWGFRPKKLNFKLFNIQVKEVTQNDGTTTIANNLTSAVQVFTDSEYQLPYVLGSAHQGCLPPFPADVFMIPQYGYLTLNNGSQAVGRSSFYCLEYFPSQMLRTGNNFTFSYTFEDVPFHSSYAHSQSLDRLMNPLIDQYLYYLSKTQGTSGTTQQSRLQFSQAGPSSMAQQAKNWLPGPSYRQQRMSKTANDNNNSEFAWTAATKYYLNGRNSLVNPGPPVASHKDDEEKYFPMHGNLIFGKQGTGTTNVDIESVLITDEEEIRTTNPVATEQYGQVATNHQSQNTTASYGSVDSQGILPGMVWQDRDVYLQGPIWAKTPHTDGHFHPSPLMGGFGLKHPPPQILIKNTPVPANPATTFTPGKFASFITQYSTGQVSVEIEWELQKENSKRWNPEIQYTSNYNKSVNVEFTVDANGVYSEPRPIGTRYLTRNL

SEQ ID NO: 155 - DNA, 3123 bp, Adeno-associated virus
gaattcgccctttctacggctgcgtcaactggaccaatgaaaactttcccttcaacgattgcgtcgacaagatggtgatctggtgggaggagggaaagatgaccgccaaggtcgtggaatctgccaaagccattctgggtggaagcaaggttcgtgtggaccagaaatgcaagtcttcggcccagatcgacccgactccggtgattgtcacctctaacaccaacatgtgcgccgtgattgacggaaactcgaccaccttcgagcaccagcagccgttgcaagaccggatgttcaaatttgaacttacccgccgtttggatcatgactttgggaaggtcaccaagcaggaagtcaaagactttttccggtgggctcaagatcacgtgactgaggtggagcatgagttctacgtcaaaaagggtggagccaagaaaaggcccgcccccgatgatgtatatataaatgagcccaagcgggcgcgcgagtcagttgcgcagccatcgacgtcagacgcggaagcttcgataaactacgcgggcaggtaccaaaacaaatgttctcgtcacgtgggcatgaatctgatgctgtttccctgtcgacaatgcgaaagaatgaatcagaattcaaatatctgcttcacacacgggcaaaaagactgtttggaatgctttcccgtgtcagaatctcaacccgtttctgtcgtcagaaaaacgtatcagaaactttgttacattcatcatatcatgggaaaagaaccagacgcctgcactgcctgcgacctggtaaatgtggacttggatgactgtatttctgagcaataaatgacttaaatcaggtatggctgctgacggttatcttccagattggctcgaggacactctctctgaaggaatcagacagtggtggaagctcaaacctggcccaccaccgccgaaacctaaccaacaacaccgggacgacagtaggggtcttgtgcttcctgggtacaagtacctcggacccttcaacggactcgacaaaggagagccggtcaacgaggcagacgccgcggccctcgagcacgacaaagcctacgaccaccagctcaagcaaggggacaacccgtacctcaaatacaaccacgcggacgctgaatttcaggagcgtcttcaagaagatacgtctttcgggggcaacctcgggcgagcagtcttccaggccaaaaagagggtactcgagcctcttggtctggttgaggaagctgttaagacggctcctggaaaaaagagacctatagagcagtctcctgcagaaccggactcttcctcgggcatcggcgaatcaggccagcagcccgctaagaaaagactcaattttggtcagactggcgacacagagtcagtcccagaccctcaaccaatcggagaaccccccgcagccccctctggtgtgggatctaatacaatggcttcaggcggtggggcaccaatggcagacgataacgaaggcgccgacggagtgggtaattcctcgggaaattggcattgcgattccacatggatgggcgacagagttatcaccaccagcacaagaacctgggccctccccacctacaataatcacctctacaagcaaatctccagcgaatcgggagccaccaacgacaaccactacttcggctacagcaccccctgggggtattttgactttaacagattccactgtcacttctcaccacgtgactggcagcgactcatcaacaacaactggggatttagacccaagaaactcaatttcaagctcttcaacatccaagtcaaggaggtcacgcagaatgatggaaccacgaccatcgccaataaccttaccagcacggtgcaggtcttcacagactctgagtaccagctgccctacgtcctcggttcggctcaccagggctgccttccgccgttcccagcagacgtcttcatgattcctcagtacggctacttgactctgaacaatggcagccaagcggtaggacgttcttcattctactgtctagagtattttccctctcagatgctgaggacgggaaacaacttcaccttcagctacacttttgaagacgtgcctttccacagcagctacgcgcacagccagagtctggatcggctgatgaatcctctcattgaccagtacctgtattacctgagcaaaactcagggtacaagtggaacaacgcagcaatcgagactgcagttcagccaagctgggcctagctccatggctcagcaggccaaaaactggctaccgggacccagctaccgacagcagcgaatgtctaagacggctaatgacaacaacaacagtgaatttgcttggactgcagccaccaaatattacctgaatggaagaaattctctggtcaatcccgggcccccaatggccagtcacaaggacgatgaggaaaagtatttccccatgcacggaaatctcatctttggaaaacaaggcacaggaactaccaatgtggacattgaatcagtgcttattacagacgaagaagaaatcagaacaactaatcctgtggctacagaacaatacggacaggttgccaccaaccatcagagtcaggacaccacagcttcctatggaagtgtggacagccagggaatcttacctggaatggtgtggcaggaccgcgatgtctatcttcaaggtcccatttgggccaaaactcctcacacggacggacactttcatccttctccgctcatgggaggctttggactgaaacaccctcctccccagatcctgatcaaaaacacacctgtgccagcgaatcccgcgaccactttcactcctggaaagtttgcttcgttcattacccagtattccaccggacaggtcagcgtggaaatagagtgggagctgcagaaagaaaacagcaaacgctggaacccagaaattcagtacacctccaactacaacaagtcggtgaatgtggagtttaccgtggacgcaaacggtgtttattctgaaccccgccctattggcactcgttaccttacccggaacttgtaatttcctgttaatgaataaaccgatttatgcgtttcagttgaactttggtctctgcgaagggcgaattcgcggccgcta

SEQ ID NO: 156 - protein, 735 aa, Adeno-associated virus
MAADGYLPDWLEDTLSEGIRQWWKLKPGPPPPKPNQQHRDDSRGLVLPGYKYLGPFNGLDKGEPVNEADAAALEHDKAYDHQLKQGDNPYLKYNHADAEFQERLQEDTSFGGNLGRAVFQAKKRVLEPLGLVEEAVKTAPGKKRPIEQSPAEPDSSSGIGESGQQPAKKRLNFGQTGDTESVPDPQPIGEPPAAPSGVGSNTMASGGGAPMADDNEGADGVGNSSGNWHCDSTWMGDRVITTSTRTWALPTYNNHLYKQISSESGATNDNHYFGYSTPWGYFDFNRFHCHFSPRDWQRLINNNWGFRPKKLNFKLFNIQVKEVTQNDGTTTIANNLTSTVQVFTDSEYQLPYVLGSAHQGCLPPFPADVFMIPQYGYLTLNNGSQAVGRSSFYCLEYFPSQMLRTGNNFTFSYTFEDVPFHSSYAHSQSLDRLMNPLIDQYLYYLSKTQGTSGTTQQSRLQFSQAGPSSMAQQAKNWLPGPSYRQQRMSKTANDNNNSEFAWTAATKYYLNGRNSLVNPGPPMASHKDDEEKYFPMHGNLIFGKQGTGTTNVDIESVLITDEEEIRTTNPVATEQYGQVATNHQSQDTTASYGSVDSQGILPGMVWQDRDVYLQGPIWAKTPHTDGHFHPSPLMGGFGLKHPPPQILIKNTPVPANPATTFTPGKFASFITQYSTGQVSVEIEWELQKENSKRWNPEIQYTSNYNKSVNVEFTVDANGVYSEPRPIGTRYLTRNL

SEQ ID NO: 157 - DNA, 3113 bp, Adeno-associated virus
gaattcgccctttctacggctgcgtcaactggaccaatgaaaactttcccttcaacgattgcgtcgacaagatggtgatctggtgggaggagggaaagatgaccgccaaggtcgtggaatctgccaaagccattctgggtggaagcaaggttcgtgtggaccagaaatgcaagtcttcggcccagatcgacccgactccggtgattgtcacctctaacaccaacatgtgcgccgtgattgacggaaactcgaccaccttcgagcaccagcagccgttgcaagaccggatgttcaaatttgaacttacccgccgtttggatcatgactttgggaaggtcaccaagcaggaagtcaaagactttttccggtgggctcaagatcacgtgactgaggtggagcatgagttctacgtcaaaaagggtggagccaagaaaaggcccgcccccgatgatgtatatataaatgagcccaagcgggcgcgcgagtcagttgcgcagccatcgacgtcagacgcggaagcttcgataaactacgcggacaggtaccaaaacaaatgttctcgtcacgtgggcatgaatctgatgctgtttccctgtcgacaatgcgaaagaatgaatcagaattcaaatatctgcttcacacacgggcaaaaagactgtttggaatgctttcccgtgtcagaatctcaacccgttcctgtcgtcagaaaaacgtatcagaaactttgttacattcatcatatcatgggaaaagtaccagacgcctgcactgcctgcgacctggtaaatgtggacttggatgactgtatttctgagcaataaatgacttaaatcaggtatggctgctgacggttatcttccagattggctcgaggacactctctctgaaggaatcagacagtggtggaagctcaaacctggcccaccaccgccgaaacctaaccaacaacaccgggacgacagtaggggtcttgtgcttcctgggtacaagtacctcggacccttcaacggactcgacaaaggagagccggtcaacgaggcagacgccgcggccctcgagcacgacaaagcctacgaccaccagctcaagcaaggggacaacccgtacctcaaatacaaccacgcggacgctgaatttcaggagcgtcttcaagaagatacgtctttcgggggcaacctcgggcgagcagtcttccaggccaaaaagagggtactcgagcctcttggtctggttgaggaagctgttaagacggctcctggaaaaaagagacctatagagcagtctcctgcagaaccggactcttcctcgggcatcggcaaatcaggccagcagcccgctaagaaaagactcaattttggtcagactggcgacacagagtcagtcccagaccctcaaccaatcggagaaccccccgcagccccctctggtgtgggatctaatacaatggcttcaggcggtggggcaccaatggcagacaataacgaaggcgccgacggagtgggtaattcctcgggaaattggcattgcgattccacatggatgggcgacagagttatcaccaccagcacaagaacctgggccctccccacctacaataatcacctctacaagcaaatctccagcgaatcgggagccaccaacgacaaccactacttcggctacagcaccccctgggggtattttgactttaacagattccactgtcacttctcaccacgtgactggcagcgactcatcaataacaactggggatttagacccaagaaactcaatttcaagctcttcaacatccaagtcaaggaggtcacgcagaatgatggaaccacgaccatcgccaataaccttaccagcacggtgcaggtcttcacagactctgagtaccagctgccctacgtcctcggttcggctcaccagggctgccttccgccgttcccagcagacgtcttcatgattcctcagtacggctacttgactctgaacaatggcagccaagcggtaggacgttcttcattctactgtctagagtattttccctctcagatgctgaggacgggaaacaacttcaccttcagctacacttttgaagacgtgcctttccacagcagctacgcgcacagccagagtctggatcggctgatgaatcctctcattgaccagtacctgtattacctgagcaaaactcagggtacaagtggaacaacgcagcaatcgagactgcagttcaaccaagctgggcctagctccatggctcagcaggccaaaaactggctaccgggacccagctaccgacagcagcgaatgtctaagacggctaatgacaacaacaacagtgaatttgcttggactgcagccaccaaatattacccgaatggaagaaattctctggtcaatcccgggcccccaatggccagtcacaaggacgatgaggaaaagtatttccccatgcacggaaatctcatctttggaaaacaaggcacaggaactaccaatgtggacattgaatcagtgcttattacagacgaagaagaaatcagaacgactaatcctgtggctacagaacaatacggacaggttgccaccaaccgtcagagtcagaacaccacagcttcctatggaagtgtggacagccagggaatcttacctggaatggtgtggcaggaccgcgatgtctatcttcaaggtcccatttgggccaaaactcctcacacggacggacactttcatccttctccgctcatgggaggctttggactgaaacaccctcctccccagatcctgatcaaaaacacacctgtgccagcgaatcccgcgaccactttcactcctggaaagtttgcttcgttcattacccagtattccaccggacaggtcagcgtggaaatagagtgggagctgcagaaagaaaacagcaaacgctggaacccggaaattcagtacacctccaactacaacaagtcggtgaatgtggagtttaccgtggacgcaaacggtgtttattctgaaccccgccctattggcactcgttaccttacccggaacttgtaatttcctgttaatgaataaaccgatttatgcgtttcagttgaactttggtctctgcgaagggcgaattc

SEQ ID NO: 158 - protein, 735 aa, Adeno-associated virus
MAADGYLPDWLEDTLSEGIRQWWKLKPGPPPPKPNQQHRDDSRGLVLPGYKYLGPFNGLDKGEPVNEADAAALEHDKAYDHQLKQGDNPYLKYNHADAEFQERLQEDTSFGGNLGRAVFQAKKRVLEPLGLVEEAVKTAPGKKRPIEQSPAEPDSSSGIGKSGQQPAKKRLNFGQTGDTESVPDPQPIGEPPAAPSGVGSNTMASGGGAPMADNNEGADGVGNSSGNWHCDSTWMGDRVITTSTRTWALPTYNNHLYKQISSESGATNDNHYFGYSTPWGYFDFNRFHCHFSPRDWQRLINNNWGFRPKKLNFKLFNIQVKEVTQNDGTTTIANNLTSTVQVFTDSEYQLPYVLGSAHQGCLPPFPADVFMIPQYGYLTLNNGSQAVGRSSFYCLEYFPSQMLRTGNNFTFSYTFEDVPFHSSYAHSQSLDRLMNPLIDQYLYYLSKTQGTSGTTQQSRLQFNQAGPSSMAQQAKNWLPGPSYRQQRMSKTANDNNNSEFAWTAATKYYPNGRNSLVNPGPPMASHKDDEEKYFPMHGNLIFGKQGTGTTNVDIESVLITDEEEIRTTNPVATEQYGQVATNRQSQNTTASYGSVDSQGILPGMVWQDRDVYLQGPIWAKTPHTDGHFHPSPLMGGFGLKHPPPQILIKNTPVPANPATTFTPGKFASFITQYSTGQVSVEIEWELQKENSKRWNPEIQYTSNYNKSVNVEFTVDANGVYSEPRPIGTRYLTRNL

SEQ ID NO: 159 - DNA, 3122 bp, Adeno-associated virus
agcggccgcgaattcgccctttctacggctgcgtcaactggaccaatgaaaactttcccttcaacgattgcgtcgacaagatggtgatctggtgggaggagggaaagatgaccgccaaggtcgtggaatctgccaaagccattctgggtggaagcaaggttcgtgtggaccagaaatgcaggtcttcggcccagatcgacccgactccggtgattgtcacctctaacaccaacatgtgcgccgtgattgacggaaactcgaccaccttcgagcaccagcagccgttgcaagaccggatgttcaaatttgaacttacccgccgtttggatcatgactttgggaaggtcaccaagcaggaagtcaaagactttttccggtgggctcaagatcacgtgactgaggtggagcatgagttctacgtcaaaaagggtggagccaagaaaaggcccgcccccgatgatgtatatataaatgagcccaagcgggcgcgcgagtcagttgcgcagccatcgacgtcagacgcggaagcttcgataaactacgcggacaggtaccaaaacaaatgttctcgtcacgtgggcatgaatctgatgctgtttccctgtcgacaatgcgaaagaatgaatcagaattcaaatatctgcttcacacacgggcaaaaagactgtttggaatgctttcccgtgtcagaatctcaacccgtttctgtcgtcagaaaaacgtatcagaaactttgttacattcatcatatcatgggaaaagtaccagacgcctgcactgcctgcgacctggtaaatgtggacttggatgactgtatttctgagcaataaatgacttaaatcaggtatggctgctgacggttatcttccagattggctcgaggacactctctctgaaggaatcagacagtggtggaagctcaaacctggcccaccaccgccgaaacctaaccaacaacaccgggacgacagtaggggtcttgtgcttcctgggtacaagtacctcggacccttcaacggactcgacaaaggagagccggtcaacgaggcagacgccgcggccctcgagcacgacaaagcctacgaccaccagctcaagcaaggggacaacccgtacctcaaatacaaccacgcggacgctgaatttcaggagcgtcttcaagaagatacgtctttcgggggcaacctcgggcgagcagtcttccaggccaaaaagagggtactcgagcctcttggtctggttgaggaagctgttaagacggctcctggaaaaaagagacctatagagcagtctcctgcagaaccggactcttcctcgggcatcggcaaatcaggccagcagcccgctaagaaaagactcaattttggtcagactggcgacacagagtcagtcccagaccctcaaccaatcggagaaccccccgcagccccctctggtgtgggatctaatacaatggcttcaggcggtggggcaccaatggcagacaataacgaaggcgccgacggagtgggtaattcctcgggaaattggcattgcgattccacatggatgggcgacagagttatcaccaccagcacaagaacctgggccctccccacctacaataatcgcctctacaagcaaatctccagcgaatcgggagccaccaacgacaaccactacttcggctacagcaccccctgggggtattttgactttaacagattccactgtcacttctcaccacgtgactggcagcgactcatcaacaacaactggggatttagacccaagaaactcaatttcaagctcttcaacatccaagtcaaggaggtcacgcagaatgatggaaccacgaccatcgccaataaccttaccagcacggtgcaggtcttcacagactctgagtaccagctgccctacgtcctcggttcggctcaccagggctgccttccgccgttcccagcagacgtcttcatgattcctcagtacggctacttgactctgaacaatggcagccaagcggtaggacgttcttcattctactgtctagagtattttccctctcagatgctgaggacgggaaacaacttcaccttcagctacacttttgaagacgtgcctttccacagcagctacgcgcacagccagagtctggatcggctgatgaatcctctcattgaccagtacctgtattacctgagcaaaactcagggtacaagtggaacaacgcagcaatcgagactgcagttcagccaagctgggcctagctccatggctcagcaggccaaaaactggctaccgggacccagctaccgacagcagcgaatgtctaagacggctaatgacaacaacaacagtgaatttgcttggactgcagccaccaaatattacctgaatggaagaaattctctggtcaatcccgggcccccaatggccagtcacaaggacgatgaggaaaagtatttccccatgcacggaaatctcatctttggaaaacaaggcacaggaactaccaatgtggacattgaatcagtgcttattacagacgaagaagaaatcagaacaactaatcctgtggctacagaacaatacggacaggttgccaccaaccatcagagtcagaacaccacagcttcctatggaagtgtggacagccagggaatcttacctggaatggtgtggcaggaccgcgatgtctatcttcaaggtcccatttgggccaaaactcctcacacggacggacactttcatccttctccgctcatgggaggctttggactgaaacaccctcctccccagatcctgatcaaaaacacacctgtgccagcgaatcccgcgaccactttcactcctggaaagtttgcttcgttcattacccagtattccaccggacaggtcagcgtggaaatagagtgggagctgcagaaagaaaacagcaaacgctggaacccagaaattcagtacacctccaactacaacaagtcggtgaatgtggagtttaccgtggacgcaaacggtgtttattctgaaccccgccctattggcactcgttaccttacccggaacttgtaatttcctgttaatgaataaaccgatttatgcgtttcagttgaactttggtctctgcgaagggcgaattc

SEQ ID NO: 160 - protein, 735 aa, Adeno-associated virus
MAADGYLPDWLEDTLSEGIRQWWKLKPGPPPPKPNQQHRDDSRGLVLPGYKYLGPFNGLDKGEPVNEADAAALEHDKAYDHQLKQGDNPYLKYNHADAEFQERLQEDTSFGGNLGRAVFQAKKRVLEPLGLVEEAVKTAPGKKRPIEQSPAEPDSSSGIGKSGQQPAKKRLNFGQTGDTESVPDPQPIGEPPAAPSGVGSNTMASGGGAPMADNNEGADGVGNSSGNWHCDSTWMGDRVITTSTRTWALPTYNNRLYKQISSESGATNDNHYFGYSTPWGYFDFNRFHCHFSPRDWQRLINNNWGFRPKKLNFKLFNIQVKEVTQNDGTTTIANNLTSTVQVFTDSEYQLPYVLGSAHQGCLPPFPADVFMIPQYGYLTLNNGSQAVGRSSFYCLEYFPSQMLRTGNNFTFSYTFEDVPFHSSYAHSQSLDRLMNPLIDQYLYYLSKTQGTSGTTQQSRLQFSQAGPSSMAQQAKNWLPGPSYRQQRMSKTANDNNNSEFAWTAATKYYLNGRNSLVNPGPPMASHKDDEEKYFPMHGNLIFGKQGTGTTNVDIESVLITDEEEIRTTNPVATEQYGQVATNHQSQNTTASYGSVDSQGILPGMVWQDRDVYLQGPIWAKTPHTDGHFHPSPLMGGFGLKHPPPQILIKNTPVPANPATTFTPGKFASFITQYSTGQVSVEIEWELQKENSKRWNPEIQYTSNYNKSVNVEFTVDANGVYSEPRPIGTRYLTRNL

SEQ ID NO: 161 - DNA, 3121 bp, Adeno-associated virus
gaattcgcccttcgcagagaccaaagttcaactgaaacgaatcaaccggtttattgattaacaagcaattacagattacgggtgaggtaacgggtgccgatggggcgaggctcagaataagtgccatctgtgttaacagcaaagtccacatttgtagatttgtagtagttggaagtgtattgaatctctgggttccagcgtttgctgttttctttctgcagctcccattcaatttccacgctgacctgtccggtgctgtactgcgtgatgaacgacgccagcttagcttgactgaaggtagttggaggatccgcgggaacaggtgtattcttaatcaggatctgaggaggcgggtgtttcagtccaaagccccccatcagcggcgagggatgaaagtttccgtccgtgtgaggaatcttggcccagataggaccctgcaggtacacgtcccggttctgccagaccatgccaggtaaggctccttgactgttgacggcccctacaataggagcggcgttttgctgttgcaggttatcggccaccacgccgtactgttctgtggccactgggttggtggttttaatttcttcctcactggttagcataacgctgctatagtccacgttgccttttccagctccctgtttcccaaacattaagactccgctggacggaaaaaatcgctcttcgtcgtccttgtgggttgccatagcgacaccgggatttaccagagagtctctgccattcagatgatacttggtggcaccggtccaggcaaagttgctgttgttattttgcgacagtgtcgtggagacgcgttgctgccggtagcagggcccgggtagccagtttttggcctgagccgacatgttattaggcccggcctgagaaaatagcaactgctgagttcctgcggtacctcccgtggactgagtccgagacaggtagtacaggtactggtcgatgagggggttcatcagccggtccaggctttggctgtgcgcgtagctgctgtgaaaaggcacgtcctcaaactggtagctgaactcaaagttgttgcccgttctcagcatttgagaaggaaagtactccaggcagtagaaggaggaacggcccacggcctgactgccattgttcagagtcaggtacccgtactgaggaatcatgaagacgtccgccgggaacggaggcaggcagccctggcgcgcagagccgaggacgtacgggagctggtattccgagtccgtaaagacctgaatcgtgctggtaaggttattggcgatggtcttggtgccttcattctgcgtgacctccttgacctggatgttgaagagcttgaagttgagtctcttgggccggaatccccagttgttgttgatgagtcgctgccagtcacgtggtgagaagtggcagtggaatctgttaaagtcaaaatacccccagggggtgctgtagccgaagtaggtgttgtcgttggtgcttcctcccgaagtcccgttggagatttgcttgtagaggtggttgttgtaggtggggagggcccaggttcgggtgctggtggtgatgactctgtcgcccagccatgtggaatcgcaatgccaatttcctgaggaactacccactccgtcggcgccttcgttattgtctgccattggagcgccaccgcctgcagccattgtaccagatcccagaccagaggggcctgcggggggttctccgattggttgagggtcgggcactgactctgagtcgccagtctgcccaaagttgagtctctttttcgcgggctgctggcctttcttgccgatgcccgtagtggagtctggagaacgctggggtgatggctctaccggtctcttctttccaggagccgtcttagcgccttcctcaaccagaccgagaggttcgagaacccgcttcttggcctggaagactgctcgtccgaggttgcccccaaaagacgtatcttcttgcagacgctcctgaaactcggcgtcggcgtggttataccgcaggtacggattgtcacccgctttgagctgctggtcgtaggccttgtcgtgctcgagggccgctgcgtccgccgcgttgacgggctcccccttgtcgagtccgttgaagggtccgaggtacttgtagccaggaagcaccagaccccggccgtcgtcctgcttttgctggttggctttgggcttcggggctccaggtttcagcgcccaccactcgcgaatgccctcagagaggttgtcctcgagccaatctggaagataaccatcggcagccatacctgatctaaatcatttattgttcaaagatgcagtcatccaaatccacattgaccagatcgcaggcagtgcaagcgtctggcacctttcccatgatatgatgaatgtagcacagtttctgatacgcctttttgacgacagaaacgggttgagattctgacacgggaaagcactctaaacagtctttctgtccgtgagtgaagcagatatttgaattctgattcattctctcgcattgtctgcagggaaacagcatcagattcatgcccacgtgacgagaacatttgttttggtacctgtccgcgtagttgatcgaagcttccgcgtctgacgtcgatggctgcgcaactgactcgcgcacccgtttgggctcacttatatctgcgtcactgggggcgggtcttttcttggctccaccctttttgacgtagaattcatgctccacctcaaccacgtgatcctttgcccaccggaaaaagtctttgacttcctgcttggtgaccttcccaaagtcatgatccagacggcgggtgagttcaaatttgaacatccggtcttgcaacggctgctggtgttcgaaggtcgttgagttcccgtcaatcacggcgcacatgttggtgttggaggtgacgatcacgggagtcgggtctatctgggccgaggacttgcatttctggtccacgcgcaccttgcttcctccgagaatggctttggccgactccacgaccttggcggtcatcttcccctcctcccaccagatcaccatcttgtcgacacagtcgttgaagggaaagttctcattggtccagttgacgcagccgtagaagggcgaattc

SEQ ID NO: 162 - protein, 733 aa, Adeno-associated virus
MAADGYLPDWLEDNLSEGIREWWDLKPGAPKLKANQQKQDDGRGLVLPGYKYLGPFHGLDKGEPVNAADAAALEHDKAYDQQLKAGDNPYLRYNHADAEFQERLQEDTSFGGNLGRAVFQAKKRVLEPLGLVEEGAKTAPGKKRPLESPQEPDSSSGIGKKGKQPAKKRLNFEEDTGAGDGPPEGSDTSAMSSDIEMRAAPGGNAVDAGQGSDGVGNASGDWHCDSTWSEGKVTTTSTRTWVLPTYNNHLYLRLGTTSNSNTYNGFSTPWGYFDFNRFHCHFSPRDWQRLINNNWGLRPKAMRVKIFNIQVKEVTTSNGETTVANNLTSTVQIFADSSYELPYVMDAGQEGSLPPFPNDVFMVPQYGYCGIVTGENQNQTDRNAFYCLEYFPSQMLRTGNNFEMAYNFEKVPFHSMYAHSQSLDRLMNPLLDQYLWHLQSTTSGETLNQGNAATTFGKIRSGDFAFYRKNWLPGPCVKQQRFSKTASQNYKIPASGGNALLKYDTHYTLNNRWSNIAPGPPMATAGPSDGDFSNAQLIFPGPSVTGNTTTSANNLLFTSEGEIAATNPRDTDMFGQIADNNQNATTAPITGNVTAMGVLPGMVWQNRDIYYQGPIWAKIPHADGHFHPSPLIGGFGLKHPPPQIFIKNTPVPANPATTFTAARVDSFITQYSTGQVAVQIEWEIEKERSKRRNPEVQFTSNYGNQSSMLWAPDTTGKYTEPRVIGSRYLTNHL

SEQ ID NO: 163 - protein, 735 aa, Adeno-associated virus
MAADGYLPDWLEDTLSEGIRQWWKLKPGPPPPKPNQQHRDDSRGLVLPGYKYLGPFNGLDKGEPVNEADAAALEHDKAYDHQLKQGDNPYLKYNHADAEFQERLQEDTSFGGNLGRAVFQAKKRVLEPLGLVEEAVKTAPGKKRPIEQSPAEPDSSSGIGKSGQQPAKKRLNFGQTGDTESVPDPQPIGEPPAAPSGVGSNTMASGGGAPMADNNEGADGVGNSSGNWHCDSTWMGDRVITTSTRTWALPTYNNHLYKQISSESGATNDNHYFGYSTPWGYFDFNRFHCHFSPRDWQRLINNNWGFRPKKLNFKLFNIQVKEVTQNDGTTTIANNLTSTVQVFTDSEYQLPYVLGSAHQGCLPPFPADVFMIPQYGYLTLNNGSQAVGRSSFYCLEYFPSQMLRTGNNFTFSYTFEDVPFHSSYAHSQSLDRLMNPLIDQYLYYLSKTQGTSGTTQQSRLQFSQAGPSSMAQQAKNWLPGPSYRQQRMSKTANDNNNSEFAWTAATKYYLNGRNSLVNPGPPMASHKDDEEKYFPMHGNLIFGKQGTGTTNVDIESVLITDEEEIRTTNPVATEQYGQVATNHQSQNTTASYGSVDSQGILPGMVWQDRDVYLQGPIWAKIPHTDGHFHPSPLMGGFGLKHPPPQILIKNTPVPANPATTFTPGKFASFITQYSTGQVSVEIEWELQKENSKRWNPEIQYTSNYNKSVNVEFTVDANGVYSEPRPIGTRYLTRNL

SEQ ID NO: 164 - DNA, 3127 bp, Adeno-associated virus
gcggccgcgaattcgcccttcgcagagaccaaagttcaactgaaacgaatcaaccggtttattgattaacatgcaattacagattacgggtgaggtaacgagtgccaatagggcgaggctcagagtaaacaccctggctgtcaacggcaaagtccacaccagtctgcttttcaaagttggaggtgtactgaatctccgggtcccagcgcttgctgttttccttctgcagctcccactcgatttccacgctgacttgtccggtgctgtactgtgtgatgaacgaagcaaacttggcaggagtaaacacctccggaggattagcgggaacgggagtgttcttgatcaggatctgaggaggcggatgtttaagtccaaagccgcccatcaaaggagacgggtgaaagttgccatccgtgtgaggaatcttggcccagatgggaccctgcaggtacacgtcccggttctgccagaccatgccaggtaaggctccctggttgttgacaacttgtgtctgggctgcagtattagccgcttgtaagttgctgctgactatcccgtattcttccgtggctacaggattagtaggacgaatttcttcttcatttgtcattaacacattttccaatgtagttttgttagttgctccagtttttccaaaaatcaggactccgctggatgggaaaaagcggtcctcgtcgtccttgtgagttgccatggcgacgccgggattaaccaacgagtttctgccgttcaggtgatatttggtggcaccagtccaagcaaagttgctgttgttgttttgatccagcgttttggagaccctttgttgccggaagcagggtccaggtaaccaattcttggcttgttcggccatagttgaaggcccgccctggtaaaactgcagttcccgattgccagctgtgcctcctgggtcactctgtgttctggccaggtagtacaagtactggtcgatgaggggattcatcagccggtccaggctctggctgtgtgcgtagctgctgtggaaaggcacgtcctcgaagctgtagctgaactcaaagttgttgcccgttctcagcatctgagaggggaagtactccaggcagtagaaggaggaacgtcccacagactgactgccattgttgagagtcaggtagccgtactgaggaatcatgaagacgtccgccgggaacggaggcaggcagccctggtgcgcagagccgaggacgtacggcagctggtattccgagtccgagaatacctgaatcgtgctggtaaggttattagcgatggtcgtaacgccgtcattcgtcgtgacctccttgacctggatgttgaagagcttgaaccgcagcttcttgggccggaatccccagttgttgttgatgagtcgctgccagtcacgtggtgagaagtggcagtggaatctgttaaagtcaaaatacccccagggggtgctgtagccgaagtaggtgttgtcgttggtactacctgcagtttcactggagatttgctcgtagaggtggttgttgtaggtgggcagggcccaggttcgggtgctggtggtaatgactctgtcgcccagccatgtggaatcgcaatgccaatttcctgaggcattacccactccgtcggcaccttcgttattgtctgccattggtgcgccaccgcctgcagccactgtaccagatcccacactagagggcgctgctggaggttctccgagaggttgagggtcggggactgactctgagtcgccagtctgaccgaaattgagtctctttctggcgggctgctggcccttcttgccgatgcccgtggaggagtcgggggaacgctgaggtgacggctctaccggtctcttctttgcaggagccgtcttagcgccttcctcaaccagaccgagaggttcgagaacccgcttcttggcctggaagactgctcgcccgaggttgcccccaaatgacgtatcttcttgcagacgctcctgaaactcggcgtcggcgtggttataccgcaggtacgggttgtcacccgcattgagctgctggtcgtaggccttgtcgtgctcgagggccgctgcgtccgccgcgttgacgggctcccccttgtcgagtccgttgaagggtccgaggtacttgtagccaggaagcaccagaccccggccgttgtcctgcttttgctggttggctttgggtttcggggctccaggtttcaggtcccaccactcgcgaatgccctcagagaggttgtcctcgagccaatctggaagataaccatcggcagccatacctgatttaaatcatttattgttcaaagatgcagtcatccaaatccacattgaccagatcgcaggcagtgcaagcgtctggcacctttcccatgatatgatgaatgtagcacagtttctgatacgcctttttgacgacagaaacgggtttagattctgacacgggaaagcactctaaacagtctttctgtccgtgagtgaagcagatatttgaattctgattcattctctcgcattgtctgcagggaaacagcatcagattcatgcccacgtgacgagaacatttgttttggtacctgtctgcgtagttgatcgaagcttccgcgtctgacgtcgatggctgcgcaactgactcgcgcacccgtttgggctcacttatatctgcgtcactgggggcgggtcttttcttggctccaccctttttgacgtagaattcatgctccacctcaaccacgtaatcctttgcccaccggaaaaagtctttgacttcctgcttggtgaccttcccaaagtcatgatccagacggcgggtgagttcaaatttgaacatccggtcttgcaacggctgctggtgttcgaaggtcgttgagttcccgtcgatcacggcgcacatgttggtgttggagatgacgatcgcgggagtcgggtctatctgggccgaggacttgcatttctggtccacgcgcaccttgcttcctccgagaatggctttggccgactccacgaccttggcggtcatcttcccctcctcccaccagatcaccatcttgtcgacacagtcgttgaagggaaagttctcattggtccagttgacgcagccgtagaaagggcgaattc

SEQ ID NO: 165 - protein, 728 aa, Adeno-associated virus
MAADGYLPDWLEDNLSEGIREWWDLKPGAPKPKANQQKQDDGRGLVLPGYKYLRPFNGLDKGEPVNEADAAALEHDKAYDKQLEQGDNPYLKYNHADAEFQERLQEDTSFGGNLGRAVFQAKKRVLEPLGLVEEVAKTAPGKKRPIESPDSSTGIGKKGQQPAKKKLNFGQTGDSESVPDPQPLGEPPAAPSGLGSGTMAAGGGAPMADNNEGADGVGNASGNWHCDSTWLGDRVITTSTRTWALPTYNNHLYKQISSQSGATNDNHFFSYSTPWGYFDFNRFHCHFSPRDWQRLINNNWGFRPRKLRFKLFNIQVKEVTTNDGVTTIANNLTSTIQVFSDSEYQLPYVLGSAHQGCLPPFPADVFMIPQYGYLTLNNGSQSVGRSSFYCLEYFPSQMLRTGNNFEFSYTFEEVPFHSSYVHSQSLDRLMNPLIDQYLYYLARTQSTTGSTRELQFHQAGPNTMAEQSKNWLPGPCYRQQRLSKNIDSNNNSNFAWTGATKYHLNGRNSLTNPGVAMATNKDDEDQFFPINGVLVFGKTGAANKTTLENVLMTSEEEIKTTNPVATEEYGVVSSNLQSSTAGPQTQTVNSQGALPGMVWQNRDVCLQGPIWAKIPHTDGNFHPSPLMGGFGLKHPPPQILIKNTPVPANPPEVFTPAKFASFITQYSTGQVSVEIEWELQKENSKRWNPEIQYTSNYAKSNNVEFAVNNEGVYTEPRPIGTRYLTRNL

SEQ ID NO: 166 - DNA, 3106 bp, Adeno-associated virus
gcggccgcgaattcgcccttcgcagagaccaaagttcaactgaaacgaatcaaccggtttattgattaacaagtaattacaggttacgggtgaggtaacgggtgccaatggggcgaggctcagtataaaccccttcgttgttgacagcaaattccacattattagacttggcataatttgaggtgtactgaatctctggattccagcgtttgctgttttctttctgcagttcccactcgatctccacgctgacctggccggtgctgtactgcgtgataaatgaggcaaacttggcaggagtaaacacctctggaggattagcaggtaccggggtgtttttgatgagaatttgaggaggcgggtgtttgagtccaaatccgcccatcaggggagacgggtgaaagttgccgtccgtgtgaggaattttggcccagatgggaccctgcaggcacacgtcccggttctgccagaccatgccgggcagagccccctggctgttgacagtctgtgtctggggtccggccgtagacgattgcaggttgctggagaccacaccgtattcttctgtagccacgggattggtggttttgatctcctcctcgctggtcattagcacgttttccagcgttgtcttgttggcagcccccgttttgccaaaaaccagcactccgttgatgggaaagaactggtcctcgtcgtccttgttggtggccatggctacgcccgggttggttaatgaatttctaccattcagatggtatttagtggccccggtccaggcaaagttactgttgttgttgctgtctatgttttttgacagtctctgctgccgataacagggtccgggcagccagttctttgattgctcggccatggtgttgggcccagcctgatggaactgcagctcccttgtggaccccgtagtgctctgggtccgggccaggtagtacaggtactggtcgatgaggggattcatcagccggtctaggctctggctgtgcacatagctgctgtggaaaggcacttcctcaaaggtgtagctgaattcaaagttattgcccgttctcagcatctgagaaggaaagtactccaggcagtagaaggaggaacgtcccacagactgactgccgttgtttagagtcagatatccgtactgaggaatcatgaacacgtccgcagggaacggagggaggcagccctggtgcgcagagccgaggacgtacggcagttggtactccgagtccgagaagacctgaatcgtgctggtaaggttattagcgatggtcgtaacgccgtcgttcgtcgtgacctccttgacctggatgttgaacaacttgaaccgcagctttctgggccggaatccccagttgttgttgatgagtcgctgccagtcacgtggtgagaagtggcagtggaatctgttgaagtcaaaatagccccagggggtgctgtagctgaagaagtggttgtcgttggtagccccgctctgacttgatatctgcttgtagaggtggttgttgtaggtgggcagggcccaggtgcgggtgctggtggtgatgactctgtcgcccagccatgtggaatcgcaatgccaatttccggaggcattacccactccgtcggcgccttcgttattgtctgccattggtgcgccaccgcctgcagccattgtaccagatcccagacctgagggcgcggcgggaggttctccgagaggttgggggtcgggcactgactctgagtcgccagtctgcccaaagttgagcttctttttagcgggctgctggcctttcttgccgatgcccgtggaggagtcgggggattctatgggtctcttctttccaggagccgtcttagcgacttcctcaaccagaccgagaggttcgagaacccgcttcttggcctggaagactgctcgcccgaggttgcccccaaaagacgtatcttcttgaagacgctcctgaaactcggcgtcggcgtggttgtacttgaggtacgggttgtccccctgctcgagctgcttgtcgtaggccttgtcgtgctcgagggccgcggcgtctgcctcgttgaccggctctcccttgtcgagtccgttgaagggtctgaggtacttgtagccaggaagcaccagaccccggccgtcgtcctgcttttgctggttggctttgggtttcggggctccaggtttcaagtcccaccactcgcgaatgccctcagagaggttgtcctcgagccaatctggaagataaccatcggcagccatacctggtttaagtcatttattgctcagaaacacagtcatccaggtccacgttgaccagatcgcaggccgagcaagcaatctcgggagcccgccccagcagatgatgaatggcacagagtttccgatacgtcctctttctgacgaccggttgagattctgacacgccggggaaacattctgaacagtctctggtcccgtgcgtgaagcaaatgttgaaattctgattcactctctcgcatgtcttgcagggaaacagcatctgaagcatgcccgcgtgacgagaacatttgttttggtacctgtcggcaaagtccaccggagctccttccgcgtctgacgtcgatggattcgcgactgaggggcaggcccgcttgggctcgcttttatccgcgtcatcgggggcgggtctcttgttggccccaccctttctgacgtagaacccatgcgccacctcggtcacgtgatcctgcgcccagcggaagaaccttttgacttcctgctttgtcaccttgccaaagttatgctccagacggcgggtgggttcaaatttgaacatccggtcctgcaacggctgctggtgctcgaaggtggcgctgttcccgtcaatcacggcgcacatgttggtgttggaggtgacggtcacgggggtggggtcgatctgggcggacgacttgcacttttggtccacgcgcaccttgctgccgccgagaatggccttggcggactccacgaccttggccgtcatcttgccctcctcccaccagatcaccatcttgtcggcgcaatcgttgaagggaaagttctcattggtccagttgacgcagccgtagaaagggcgaattc

SEQ ID NO: 167 - protein, 728 aa, Adeno-associated virus
MAADGYLPDWLEDNLSEGIREWWDLKPGAPKPKANQQKQDDGRGLVLPGYKYLGPFNGLDKGEPVNEADAAALEHDKAYDKQLEQGDNPYLKYNHADAEFQERLQEDTSFGGNLGRAVFQAKKRVLEPLGLVEEGAKTASGKKRPIESPDSSTGIGKKGQQPAKKKLNFGQTGDSESVPDPQPLGEPPAAPSGLGSGTMAAGGGAPMADNNEGADGVGNASGNWHCDSTWLGDRVITTSTRTWALPTYNNHLYKQISSQSGATNDNHFFGYSTPWGYFDFNRFHCHFSPRDWQRLINNNWGFRPRKLRFKLFNIQVKEVTTNDGVTTIANNLTSTIQVFSDSEYQLPYVLGSAHQGCLPPFPADVFMIPQYGYLTLNNGSQSVGRSSFCCLEYFPSQMLRTGNNFEFSYTFEEVPFHSSYAHSQSLDRLMNPLIDQYLYYLARTQSTTGSTRELQFHQAGPNTVAEQSKNWLPGPCYRQQRLSKNIDSNNNSNFAWTGATKYHLNGRNSLTNPGVAMATNKDDEDQFLPINGVLVFGKTGAANKTTLENVLMTSEEEIKTTNPVATEEYGVVSSNLQSSTAGPRTQTVNSQGALPGMVWQNRDVYLQGPIWAEIPHTDGNFHPSPLMGGFGLKHPPPQILIKNTPVPANPPEVFTPAKFASFITQYSTGQVSVEIEWELQKENSKRWNPEIQYTSNYAKSNNVEFAVNNEGVYTEPRPIGTRYLTRNL

SEQ ID NO: 168 - DNA, 3102 bp, Adeno-associated virus
gcggccgcgaattcgcccttcgcagagaccaaagttcaactgaaacgaatcaaccggtttattgattaacaagtaattacaggttacgggtgaggtaacgggtgccaatggggcgaggctcagtataaaccccttcgttgttgacagcaaattccacattattagacttggcataatttgaggtgtactgaatctctggattccagcgtttgctgttttctttctgcagttcccactcgatctccacgctgacctggccggtgctgtactgcgtgataaatgaggcaaacttggcaggagtaaacacctctggaggattagcaggtaccggggtgtttttgatgagaatttgaggaggcgggtgtttgagtccaaatccgcccatcaggggagacgggtgaaagttgccgtccgtgtgaggaatttcggcccagatgggaccctgcaggtacacgtcccggttctgccagaccatgccgggcagagccccctggctgttgacagtctgtgtccggggtccggccgtagacgattgcaggttgctggagaccacaccgtattcttctgtagccacgggattggtggttttgatctcctcctcgctggtcattagcacgttttccagcgttgtcttgttggcagcccccgttttgccaaaaaccagcactccgttgatgggaaggaactggtcctcgtcgtccttgttggtggccatggctacgcccgggttggttaatgaatttctaccattcagatggtatttagtggccccggtccaggcaaagttactgttgttgttgctgtctatgttttttgacagtctctgctgccgataacagggtccgggcagccagttctttgattgctcggccacggtgttgggcccagcctgatggaactgcagctcccttgtggaccccgtagtgctctgggtccgggccaggtagtacaggtactggtcgatgaggggattcatcagccggtccaggctctggctgtgcgcatagctgctgtggaaaggcacttcctcaaaggtgtagctgaattcaaagttattgcccgttctcagcatctgagaaggaaagtactccaggcagcagaaggaggaacgtcccacagactgactgccgttgtttagagtcagatatccgtactgaggaatcatgaacacgtccgcagggaacggagggaggcagccctggtgcgcagagccgaggacgtacggcagttggtactccgagtccgagaagacctgaatcgtgctggtaaggttattagcgatggtcgtaacgccgtcgttcgtcgtgacctccttgacctggatgttgaacaacttgaaccgcagctttctgggccggaatccccagttgttgttgatgagtcgctgccagtcacgtggtgagaagtggcagtggaatctgttgaagtcaaaatagccccagggggtgctgtagccgaagaagtggttgtcgttggtagccccgctctgacttgatatctgcttgtagaggtggttgttgtaggtgggcagggcccaggtgcgggtgctggtggtgatgactctgtcgcccagccatgtggaatcgcaatgccaatttccggaggcattacccactccgtcggcgccttcgttattgtctgccattggtgcgccaccgcctgcagccattgtaccagatcccagacctgagggcgcggcgggaggttctccgagaggttgggggtcgggcactgactctgagtcgccagtctgcccaaagttgagcttctttttagcgggctgctggcctttcttgccgatgcccgtggaggagtcgggggattctatgggtctcttctttccggaagccgtcttagcgccttcctcaaccagaccgagaggttcgagaacccgcttcttggcctggaagactgctcgcccgaggttgcccccaaaagacgtatcttcttgaagacgctcctgaaactcggcgtcggcgtggttgtacttgaggtacgggttgtccccctgctcgagctgcttgtcgtaggccttgtcgtgctcgagggccgcggcgtctgcctcgttgaccggctctcccttgtcgagtccgttgaagggtccgaggtacttgtagccaggaagcaccagaccccggccgtcgtcctgcttttgctggttggctttgggtttcggggctccaggtttcaagtcccaccactcgcgaatgccctcagagaggttgtcctcgagccaatctggaagataaccatcggcagccatacctggtttaagtcatttattgctcagaaacacagtcatccaggtccacgttgaccagatcgcaggccgagcaagcaatctcgggagcccgccccagcagatgatgaatggcacagagtttccgatacgtcctctttctgacgaccggttgagattctgacacgccggggaaacattctgaacagtctctggtcccgtgcgtgaagcaaatgttgaaattctgattcattctctcgcatgtcttgcagggaaacagcatctgaagcatgcccgcgtgacgagaacatttgttttggtacctgtcggcaaagtccaccggagctccttccgcgtctgacgtcgatggatccgcgactgaggggcaagcccgcttgggctcgcttttatccgcgtcatcgggggcgggtctcttgttggctccaccctttctgacgtagaactcatgcgccacctcggtcacgtgatcctgcgcccagcggaagaactctttgacttcctgctttgtcaccttgccaaagtcatgctccagacggcgggtgagttcaaatttgaacatccggtcttgtaacggctgctggtgctcgaaggtggtgctgttcccgtcaatcacggcgcacatgttggtgttggaagtgacgatcacgggggtgggatcgatctgggcggacgacttgcacttttggtccacgcgcaccttgctgccgccgagaatggccttggcggactccacgaccttggccgtcatcttgccctcctcccaccagatcaccatcttgtcgacgcaatcgttgaagggaaagttctcattggtccagttgacgcagccgaagggcgaattc

SEQ ID NO: 169 - protein, 728 aa, Adeno-associated virus
MAADGYLPDWLEDNLSEGIREWWDLKPGAPKPKANQQKQDDGRGLVLPGYRYLGPFNGLDKGEPVNEADAAALEHDKAYDKQLEQGDNPYLKYNHADAEFQERLQEDTSFGGNLGRAVFQAKKRVLEPLGLVEEGAKTAPGKKRPIESPDSSTGIGKNGQPPAKKKLNFGQTGDSESVPDPQPLGEPPAAPSGLGSGTMAAGGGAPMADNNEGADGVGNASGNWHCDSTWLGDRVITTSTRTWALPTYNNHLYKQISSQSGATNDNHFFGYSTPWGYFDFNRFHCHFSPRDWQRLINNNWGFRPRKLRFKLFNIQVKEVTTNDGVTTIANNLTSTIQVFSDSEYQLPYVLGSAHQGCLPPFPADVFMIPQYGYLTLNNGSQSVGRSSFYCLEYFPSQMLRTGNNFEFSYTFEEVPFHSSYAHSQSLDRLMNPLIDQYLYYLARTQSTTGSTRELQFHQAGPNTMAEQSKNWLPGPCYRQQRLSKNIDSNNNSNFAWTGATKYHLNGRNSLTNPGVAMATNKDDEDQFFPINGVLVFGKTGAANKTTLENVLMTSEEEIKTTNPVATEEYGVVSSNLQSSTAGPQTQTVNSQGALPGMVWQNRDVYLQGPIWAKIPHTDGNFHPSPLMGGFGLKHPPPQILIKNTPVPANPPEVFTPAKFASFITQYSTGQVSVEIEWELQKENSKRWNPEIQYTSNYAKSNNVEFAVNNEGVYTEPRPIGTRYLTRNL

SEQ ID NO: 170 - protein, 728 aa, Adeno-associated virus
MAADGYLPDWLEGNLSEGIREWWDLKPGAPKPKANQQKQDDGRGLVLPGYRYLGPFNGLDKGEPVNEADAAALEHDKAYDKQLEQGDNPYLKYNHADAEFQERLQEDTSFGGNLGRAVFQAKKRVLEPLGLVEEGAKTAPGKKRPIESPDSSTGIGKNGQPPAKKKLNFGQTGDSESVPDPQPLGEPPAAPSGLGSGTMAAGGGAPMADNNEGADGVGNASGNWHCDSTWLGDRVITTSTRTWALPTYNNHLYKQISSQSGATNDNHFFGYSTPWGYFDFNRFHCHFSPRDWQRLINNNWGFRPRKLRFKLFNIQVKEVTTNDGVTTIANNLTSTIQVFSDSEYQLPYVLGSAHQGCLPPFPADVFMIPQYGYLTLNNGSQSVGRSSFYCLEYFPSQMLRTGDNFEFSYTFEEVPFHSSYAHSQSLDRLMNPLIDQYLYYLARTQSTTGSTRELQFHQAGPNTMAEQSKNWLPGPCYRQQRLSKNIDSNNNSNFAWTGATKYHLNGRNSLTNPGVAMATNKDDEDQFFPINGVLVFGKTGAANKTTLENVLMTSEEEIKTTNPVATEEYGVVSSNLQSSTAGPQTQTVNSQGALPGMVWQNRDVYLQGPIWAKIPHTDGNFHPSPLMGGFGLKHPPPQILIKNTPVPANPPEVFTPAKFASFITQYSTGQVSVEIEWELQKENSKRWNPEIQYTSNYAKSNNVEFAVNNEGVYTEPRPIGTRYLTRNL

SEQ ID NO: 171 - DNA, 3106 bp, Adeno-associated virus
gcggccgcgaattcgcccttcgcagagaccaaagttcaactgaaacgaatcagccggtttattgattaacaagtaattacaggttacgggtgaggtaacgggtgccaatggggcgaggctcagtataaaccccttcgttgttgacagcaaattccacattattagacttggcataatttgaggtgtactgaatctctggattccagcgtttgctgttttctttctgcagttcccactcgatctccacgctgacctggccggtgctgtactgcgtgataaatgaggcaaacttggcaggagtaaacacctctggaggattagcaggtaccggggtgtttttgatgagaatttgaggaggcgggtgtttgagtccaaatccgcccatcaggggagacgggtgaaagttgccgtccgtgtgaggaattttggcccagatgggaccctgcaggtacacgtcccggttctgccagaccatgccgggcagagccccctggctgttgacagtctgtgtctggggtccggccgtagacgattgcaggttgctggagaccacaccgtattcttctgtagccacgggattggtggttttgatctcctcctcgctggtcattagcacgttttccagcgttgtcttgttggcagcccccgttttgccaaaaaccagcactccgttgatgggaaagaactggtcctcgtcgtccttgttggtggccatggctacgcccgggttggttaatgaatttctaccattcagatggtatttagtggccccggtccaggcaaagttactgttgttgttgctgtctatgttttttgacagtctctgctgccgataacagggtccgggcagccagttctttgattgctcggccatggtgttgggcccagcctgatggaactgcagctcccttgtggaccccgtagtgctctgggtccgggccaggtagtacaggtactggtcgatgaggggattcatcagccggtccaggctctggctgtgcgcatagctgctgtggaaaggcacttcctcaaaggtgtagctgaattcaaagttatcgcccgttctcagcatctgagaaggaaagtactccaggcagtagaaggaggaacgtcccacagactgactgccgttgtttagagtcagatatccgtactgaggaatcatgaacacgtccgcagggaacggagggaggcagccctggtgcgcagagccgaggacgtacggcagttggtactccgagtccgagaagacctgaatcgtgctggtaaggttattagcgatggtcgtaacgccgtcgttcgtcgtgacctccttgacctggatgttgaacaacttgaaccgcagctttctgggccggaatccccagttgttgttgatgagtcgctgccagtcacgtggtgagaagtggcagtggaatctgttgaagtcaaaatagccccagggggtgctgtagccgaagaagtggttgtcgttggtagccccgctctgacttgatatctgcttgtagaggtggttgttgtaggtgggcagggcccaggtgcgggtgctggtggtgatgactctgtcgcccagccatgtggaatcgcaatgccaatttccggaggcattacccactccgtcggcgccttcgttattgtctgccattggtgcgccaccgcctgcagccattgtaccagatcccagacctgagggcgcggcgggaggttctccgagaggttgggggtcgggcactgactctgagtcgccagtctgcccaaagttgagcttctttttagcgggcggctggccgttcttgccgatgcccgtggaggagtcgggggattctatgggtctcttctttccaggagccgtcttagcgccttcctcaaccagaccgagaggttcgagaacccgcttcttggcctggaagactgctcgcccgaggttgcccccaaaagacgtatcttcttgaagacgctcctgaaactcggcgtcggcgtggttgtacttgaggtacgggttgtccccctgctcgagctgcttgtcgtaggccttgtcgtgctcgagggccgcggcgtctgcctcgttgaccggctctcccttgtcgagtccgttgaagggtccgaggtacctgtagccaggaagcaccagaccccggccgtcgtcctgcttttgctggttggctttgggtttcggggctccaggtttcaagtcccaccactcgcgaatgccctcagagaggttgccctcgagccaatctggaagataaccatcggcagccatacctggtttaagtcatttattgctcagaaacacagtcatccaggtccacgttggccagatcgcaggccgagcaagcaatctcgggagcccgccccagcagatgatgaatggcacagagtttccgatacgtcctctttctgacgaccggttgagattctgacacgccggggaaacattctgaacagtctctggtcccgtgcgtgaagcaaatgttgaaattctgattcattctctcgcatgtcttgcaggggaacagcatctgaagcatgcccgcgtgacgagaacatttgttttggtacctgtcggcaaagtccaccggagctccttccgcgtctgacgtcgatggatccgcgactgaggggcaggcccgcttgggctcgcttttatccgcgtcatcgggggcgggtctcttgttggctccaccctttctgacgtagaactcatacgccacctcggtcacgtgatcctgcgcccagcggaagaactctttgacttcctgctttgtcaccttgccaaagtcatgctccagacggcgggtgagttcaaatttgaacatccggtcttgtaacggctgctggtgctcgaaggtggtgctgttcccgtcaatcacggcgcacatgttggtgttggaagtgacgatcacgggggtgggatcgatctgggcggacgacttgcacttttggtccacgcgcaccttgctgccgccgagaatggccttggcggactccacgaccttggccgtcatcctgccctcctcccaccagatcaccatcttgtcgacgcaatcgttgaagggaaagttctcattggtccagttgacgcagccgtagaaagggcgaattc

SEQ ID NO: 172 - protein, 728 aa, Adeno-associated virus
MAADGYLPDWLEDNLSEGIREWWDLKPGAPKPKANQQKQDDGRGLVLPGYKYLGPFNGLDKGEPVNEADAAALEHDKAYDKQLEQGDNPYLKYNHADAEFQERLQEDTSFGGNLGRAVFQAKKRVLEPLGLVEEGAKTAPGKKRPIESPDSSTGIGKKGQQPAKKKLNFGQTGDSESVPDPQPLGEPPAAPSGLGSGTMAAGGGAPMADNNEGADGVGNASGNWHCDSTWLGDRVITTSTRTWALPTYNNHLYKQISSQSGATNDNHFFGYSTPWGYFDFNRFHCHFSPRDWQRLINNNWGFRPRKLRFKLFNIQVKEVTTNDGVTTIANNLTSTIQVFSDSEYQLPYVLGSAHQGCLPPFPADVFMIPQYGYLTLNNGSQSMGRSSFYCLEYFPSQMLRTGNNFEFSYTFEEVPFHSSYAHSQSLDRLMNPLIDQYLYYLARTQSTTGSTRELQFHQAGPNTMAEQSKNWLPGPCYRQQRLSKNIDSNNNSNFAWTGATKYHLNGRNSLTNPGVAMATNKDDEGQFFPINGVLVFGKTGAANKTTLENVLMTSEEEIKTTNPVATEEYGVVSSNLQSSTAGPQTQTVNSQGALPGMVWQNRDVYLQGPIWAKIPHTDGNFHPSPLMGGFGLKHPPPQILIKNTPVPANPPGVFTPALFASFITQYSTGQVSVEIEWELQKENSKRWNPEIQYTSNYAKSNNVEFAVNNEGVYTEPRPIGTRYLTRNL

SEQ ID NO: 173 - DNA, 3098 bp, Adeno-associated virus
gaattcgcccttcgcagagaccaaagttcaactgaaacgaatcaaccggtttattgattaacaagtaattacaggttacgggtgaggtaacgggtgccaatggggcgaggctcagtataaaccccttcgttgttgacagcaaattccacattattagacttggcataatttgaggtgtactgaatctctggattccagcgtttgctgttttctttctgcagttcccactcgatctccacgctgacctggccggtgctgtactgcgtgataaatgaggcaaactaggcaggagtaaacacccctggaggattagcaggtaccggggtgtttttgatgagaatttgaggaggcgggtgtttgagtccaaatccgcccatcaggggagacgggtgaaagttgccgtccgtgtgaggaattttggcccagatgggaccctgcaggtacacgtcccggttctgccagaccatgccgggcagagccccctggctgttgacagtctgtgtctggggtccggccgtagacgattgcaggttgctggagaccacaccgtattcttctgtagccacgggattggtggttttgatctcctcctcgctggtcattagcacgttttccagcgttgtcttgttggcagcccccgttttgccaaaaaccagcactccgttgatgggaaagaactggccctcgtcgtccttgttggtggccatggctacgcccgggttggttaatgaatttctaccattcagatggtatttagtggccccggtccaggcaaagttactgttgttgttgctgtctatgttttttgacagtctctgctgccgataacagggtccgggcagccagttctttgattgctcggccatggtgttgggcccagcctgatggaactgcagctcccttgtggaccccgtagtgctctgggtccgggccaggtagtacaggtactggtcgatgaggggattcatcagccggtccaggctctggctgtgcgcatagctgctgtggaaaggcacttcctcaaaggtgtagctgaattcaaagttattgcccgttctcagcatctgagaaggaaagtactccaggcagtagaaggaggaacgtcccatagactgactgccgttgtttagagtcagatatccgtactgaggaatcatgaacacgtccgcagggaacggagggaggcagccctggtgcgcagagccgaggacgtacggcagttggtactccgagtccgagaagacctgaatcgtgctggtaaggttattagcgatggtcgtaacgccgtcgttcgtcgtgacctccttgacctggatgttgaacaacttgaaccgcagctttctgggccggaatccccagttgttgttgatgagtcgctgccagtcacgtggtgagaagtggcagtggaatctgttgaagtcaaaatagccccagggggtgctgtagccgaagaagtggttgtcgttggtagccccgctctgacttgatatctgcttgtagaggtggttgttgtaggtgggcagggcccaggtgcgggtgctggtggtgatgactctgtcgcccagccatgtggaatcgcaatgccaatttccggaggcattacccactccgtcggcgccttcgttattgtctgccattggtgcgccaccgcctgcagccattgtaccagatcccagacctgagggcgcggcgggaggttctccgagaggttgggggtcgggcactgactctgagtcgccagtctgcccaaagttgagcttctttttagcgggctgctggcctttcttgccgatgcccgtggaggagtcgggggattctatgggtctcttctttccaggagccgtcttagcgccttcctcaaccagaccgagaggttcgagaacccgcttcttggcctggaagactgctcgcccgaggttgcccccaaaagacgtatcttcttgaagacgctcctgaaactcagcgtcggcgtggttgtacttgaggtacgggttgtccccctgctcgagctgcttgtcgtaggccttgtcgtgctcgagggccgcggcgtctgcctcgttgaccggctctcccttgtcgagtccgttgaagggtccgaggtacttgtagccaggaagcaccagaccccggccgtcgtcctgcttttgctggttggctttgggtttcggggctccaggtttcaagtcccaccactcgcgaatgccctcagagaggttgtcctcgagccaatctggaagataaccatcggcagccatacctggtttaagtcatttattgctcagaaacacagtcatccaggtccacgttgaccagatcgcaggccgagcaagcaatctcgggagcccgccccagcagatgatgaatggcacagagtttccgatacgtcctctttctgacgaccggttgagattctgacacgccggggaaacattctgaacagtctctggtcccgtgcgtgaagcaaatgttgaaattctgattcattctctcgcatgtcttgcagggaaacagcatctgaagcatgcccgcgtgacgagaacatttgttttggtacctgtcggcaaagtccaccggagctccttccgcgtctgacgtcgatggatccgcgactgaggggcaggcccgcttgggctcgcttttatccgcgtcatcgggggcgggcctcttgttggctccaccctttctgacgtagaactcatgcgccacctcggtcacgtgatcctgcgcccagcggaagaactctttgacttcctgctttgtcaccttgccaaagtcctgctccagacggcgggtgagttcaaatttgaacatccggtcttgtaacggctgctggtgctcgaaggtggtgctgttcccgtcaatcacggcgcacatgttggtgttggaagtgacgatcacgggggtgggatcgatctgggcggacgacttgcacttttggtccacgcgcaccttgctgccgccgagaatggccttggcggactccacgaccttggccgtcatcttgccctcctcccaccagatcaccatcttgtcgacgcaatcgttgaagggaaagttctcattggtccagttgacgcagccgtagaaagggcgaattc

SEQ ID NO: 174 - DNA, 2187 bp, Adeno-associated virus
atggctgccgatggttatcttccagattggctcgagggcaacctctctgagggcattcgcgagtggtgggacttgaaacctggagccccgaaacccaaagccaaccagcaaaagcaggacgacggccggggtctggtgcttcctggctacaggtacctcggacccttcaacggactcgacaagggagagccggtcaacgaggcagacgccgcggccctcgagcacgacaaggcctacgacaagcagctcgagcagggggacaacccgtacctcaagtacaaccacgccgacgccgagtttcaggagcgtcttcaagaagatacgtcttttgggggcaacctcgggcgagcagtcttccaggccaagaagcgggttctcgaacctctcggtctggttgaggaaggcgctaagacggctcctggaaagaagagacccatagaatcccccgactcctccacgggcatcggcaagaacggccagccgcccgctaaaaagaagctcaactttgggcagactggcgactcagagtcagtgcccgacccccaacctctcggagaacctcccgccgcgccctcaggtctgggatctggtacaatggctgcaggcggtggcgcaccaatggcagacaataacgaaggcgccgacggagtgggtaatgcctccggaaattggcattgcgattccacatggctgggcgacagagtcatcaccaccagcacccgcacctgggccctgcccacctacaacaaccacctctacaagcagatatcaagtcagagcggggctaccaacgacaaccacttcttcggctacagcaccccctggggctattttgacttcaacagattccactgccacttctcaccacgtgactggcagcgactcatcaacaacaactggggattccggcccagaaagctgcggttcaagttgttcaacatccaggtcaaggaggtcacgacgaacgacggcgttacgaccatcgctaataaccttaccagcacgattcaggtcttctcggactcggagtaccaactgccgtacgtcctcggctctgcgcaccagggctgcctccctccgttccctgcggacgtgttcatgattcctcagtacggatatctgactctaaacaacggcagtcagtctgtgggacgttcctccttctactgcctggagtactttccttctcagatgctgagaacgggcgataactttgaattcagctacacctttgaggaagtgcctttccacagcagctatgcgcacagccagagcctggaccggctgatgaatcccctcatcgaccagtacctgtactacctggcccggacccagagcactacggggtccacaagggagctgcagttccatcaggctgggcccaacaccatggccgagcaatcaaagaactggctgcccggaccctgttatcggcagcagagactgtcaaaaaacatagacagcaacaacaacagtaactttgcctggaccggggccactaaataccatctgaatggtagaaattcattaaccaacccgggcgtagccatggccaccaacaaggacgacgaggaccagttctttcccatcaacggagtgctggtttttggcaaaacgggggctgccaacaagacaacgctggaaaacgtgctaatgaccagcgaggaggagatcaaaaccaccaatcccgtggctacagaagaatacggtgtggtctccagcaacctgcaatcgtctacggccggaccccagacacagactgtcaacagccagggggctctgcccggcatggtctggcagaaccgggacgtgtacctgcagggtcccatctgggccaaaattcctcacacggacggcaactttcacccgtctcccctgatgggcggatttggactcaaacacccgcctcctcaaattctcatcaaaaacaccccggtacctgctaatcctccagaggtgtttactcctgccaagtttgcctcatttatcacgcagtacagcaccggccaggtcagcgtggagatcgagtgggaactgcagaaagaaaacagcaaacgctggaatccagagattcagtacacctcaaattatgccaagtctaataatgtggaatttgctgtcaacaacgaaggggtttatactgagcctcgccccattggcacccgttacctcacccgtaacctgtaa

SEQ ID NO: 175 - protein, 728 aa, Adeno-associated virus; identical to SEQ ID NO: 170

SEQ ID NO: 176 - protein, 728 aa, Adeno-associated virus
MAADGYLPDWLEDNLSEGIREWWDLKPGAPKPKANQQKQDDGRGLVLPGYRYLGPFNGLDKGEPVNEADAAALEHDKAYDKQLEQGDNPYLKYNHADAEFQERLQEDTSFGGNLGRAVFQAKKRVLEPLGLVEEGAKTAPGKKRPIESPDSSTGIGKNGQPPAKKKLNFGQTGDSESVPDPQPLGEPPAAPSGLGSGTMAAGGGAPMADNNEGADGVGNASGNWHCDSTWLGDRVITTSTRTWALPTYNNHLYKQISSQSGATNDNHFFGYSTPWGYFDFNRFHCHFSPRDWQRLINNNWGFRPRKLRFKLFNIQVKEVTTNDGVTTIANNLTSTIQVFSDSEYQLPYVLGSAHQGCLPPFPADVFMIPQYGYLTLNNGSQSVGRSSFYCLEYFPSQMLRTGDNFEFSYTFEEVPFHSSYAHSQSLDRLMNPLIDQYLYYLARTQSTTGSTRELQFHQAGPNTMAEQSKNWLPGPCYRQQRLSKNIDSNNNSNFAWTGATKYHLNGRNSLTNPGVAMATNKDDEDQFFPINGVLVFGKTGAANKTTLENVLMTSEEEIKTTNPVATEEYGVVSSNLQSSTAGPQTQTVNSQGALPGMVWQNRDVYLQGPIWAKIPHTDGNFHPSPLMGGFGLKHPPPQILIKNTPVPANPPEVFTPAKFASFITQYSTGQVSVEIEWELQKENSKRWNPEIQYTSNYAKSNNVEFAVNNEGVYTEPRPIGTRYLTRNL

SEQ ID NO: 177 - protein, 728 aa, Adeno-associated virus; identical to SEQ ID NO: 169

SEQ ID NO: 178 - protein, 728 aa, Adeno-associated virus
MAADGYLPDWLEDNLSEGIREWWDLKPGAPKPKANQQKQDDGRGLVLPGYKYLGPFNGLDKGEPVNEADAAALEHDKAYDKQLEQGDNPYLKYNHADAEFQERLQEDTSFGGNLGRAVFQAKKRVLEPLGLVEEGAKTAPGKKRPIESPDSSTGIGKNGQPPAKKKLNFGQTGDSESVPDPQPLGEPPAAPSGLGSGTMAAGGGAPMADNNEGADGVGNASGNWHCDSTWLGDRVITTSTRTWALPTYNNHLYKQISSQSGATNDNHFFGYSTPWGYFDFNRFHCHFSPRDWQRLINNNWGFRPRKLRFKLFNIQVKEVTTNDGVTTIANNLTSTIQVFSDSEYQLPYVLGSAHQGCLPPFPADVFMIPQYGYLTLNNGSQSVGRSSFYCLEYFPSQMLRTGNNFEFSYTFEEVPFHSSYAHSQSLDRLMNPLIDQYLYYLARTQSTTGSTRELQFHQAGPNTMAEQSKNWLPGPCYRQQRLSKNIDSNNNSNFAWTGATKYHLNGRNSLTNPGVAMATNKDDEDQFFPINGVLVFGKTGAANKTTLENVLMTSEEEIKTTNPVATEEYGVVSSNLQSSTAGPQTQTVNSQGALPGMVWQNRDVYLQGPIWAKIPHTDGNFHPSPLMGGFGLKHPPPQILIKNTPVPANPPEVFTPAKFASFITQYSTGQVSVEIEWELQKENSKRWNPEIQYTSNYAKSNNVEFAVNNEGVYTEPRPIGTRYLTRNL

SEQ ID NO: 179 - protein, 728 aa, Adeno-associated virus
MAADGYLPDWLEDNLSEGIREWWDLKPGAPKPKANQQKQDDGRGLVLPGYKYLGPFNGLDKGEPVNEADAAALEHDKAYDKQLEQGDNPYLKYNHADAEFQERLQEDTSFGGNLGRAVFQAKKRVLEPLGLVEEGAKTAPGKKRPIESPDSSTGIGKKGQQPAKKKLNFGQTGDSESVPDPQPLGEPPAAPSGLGSGTMAAGGGAPMADNNEGADGVGNASGNWHCDSTWLGDRVITTSTRTWALPTYNNHLYKQISSQSGATNDNHFFGYSTPWGYFDFNRFHCHFSPRDWQRLINNNWGFRPRKLRFKLFNIQVKEVTTNDGVTTIANNLTSTIQVFSDSEYQLPYVLGSAHQGCLPPFPADVFMIPQYGYLTLNNGSQSVGRSSFYCLEYFPSQMLRTGNNFEFSYTFEEVPFHSSYAHSQSLDRLMNPLIDQYLYYLARTQSTTGSTRELQFHQAGPNTMAEQSKNWLPGPCYRQQRLSKNIDSNNNSNFAWTGATKYHLNGRNSLTNPGVAMATNKDDEDQFFPINGVLVFGKTGAANKTTLENVLMTSEEEIKTTNPVATEEYGVVSSNLQSSTAGPQTQTVNSQGALPGMVWQNRDVYLQGPIWAKIPHTDGNFHPSPLMGGFGLKHPPPQILIKNTPVPANPPEVFTPAKFASFITQYSTGQVSVEIEWELQKENSKRWNPEIQYTSNYAKSNNVEFAVNNEGVYTEPRPIGTRYLTRNL

SEQ ID NO: 180 - DNA, 2215 bp, Artificial Sequence
  Description of Artificial Sequence: Synthetic polynucleotide
atggctgccgatggttatcttccagattggctcgaggacactctctctgaaggaataagacagtggtggaagctcaaacctggcccaccaccaccaaagcccgcagagcggcataaggacgacagcaggggtcttgtgcttcctgggtacaagtacctcggacccttcaacggactcgacaagggagagccggtcaacgaggcagacgccgcggccctcgagcacgacaaagcctacgaccggcagctcgacagcggagacaacccgtacctcaagtacaaccacgccgacgccgagttccaggagcggctcaaagaagatacgtcttttgggggcaacctcgggcgagcagtcttccaggccaaaaagaggcttcttgaacctcttggtctggttgaggaagcggctaagacggctcctggaaagaagaggcctgtagagcactctcctgtggagccagactcctcctcgggaaccggaaaggcgggccagcagcctgcaagaaaaagattgaattttggtcagactggagacgcagactcagtcccagaccctcaaccaatcggagaacctcccgcagccccctcaggtgtgggatctcttacaatggctgcaggcggtggcgcaccaatggcagacaataacgagggcgccgacggagtgggtaattcctcgggaaattggcattgcgattccacatggatgggcgacagagtcatcaccaccagcacccgaacctgggccctgcccacctacaacaaccacctctacaagcaaatctccaacagcacatctggaggatcttcaaatgacaacgcctacttcggctacagcaccccctgggggtattttgactttaacagattccactgccacttttcaccacgtgactggcagcgactcatcaacaacaactggggattccggcccaagagactcagcttcaagctcttcaacatccaggtcaaggaggtcacgcagaatgaaggcaccaagaccatcgccaataacctcaccagcaccatccaggtgtttacggactcggagtaccagctgccgtacgttctcggctctgcccaccagggctgcctgcctccgttcccggcggacgtgttcatgattccccagtacggctacctaacactcaacaacggtagtcaggccgtgggacgctcctccttctactgcctggaatactttccttcgcagatgctgagaaccggcaacaacttccagtttacttacaccttcgaggacgtgcctttccacagcagctacgcccacagccagagcttggaccggctgatgaatcctctgattgaccagtacctgtactacttgtctcggactcaaacaacaggaggcacgacaaatacgcagactctgggcttcagccaaggtgggcctaatacaatggccaatcaggcaaagaactggctgccaggaccctgttaccgccagcagcgagtatcaaagacatctgcggataacaacaacagtgaatactcgtggactggagctaccaagtaccacctcaatggcagagactctctggtgaatccgggcccggccatggcaagccacaaggacgatgaagaaaagtttttttcctcagagcggggttctcatctttgggaagcaaggctcagagaaaacaaatgtggacattgaaaaggtcatgattacagacgaagaggaaatcaggacaaccaatcccgtggctacggagcagtatggttctgtatctaccaacctccagagaggcaacagacaagcagctaccgcagatgtcaacacacaaggcgttcttccaggcatggtctggcaggacagagatgtgtaccttcaggggcccatctgggcaaagattccacacacggacggacattttcacccctctcccctcatgggtggattcggacttaaacaccctccgcctcagatcctgatcaagaacacgcctgtacctgcggatcctccgaccaccttcaaccagtcaaagctgaactctttcatcacccagtattctactggccaagtcagcgtggagatcgagtgggagctgcagaaggaaaacagcaagcgctggaaccccgagatccagtacacctccaactactacaaatctacaagtgtggactttgctgttaatacagaaggcgtgtactctgaaccccgccccattggcacccgttacctcacccgtaatctgtaa

SEQ ID NO: 181 - protein, 737 aa, Artificial Sequence
  Description of Artificial Sequence: Synthetic polypeptide
MAADGYLPDWLEDTLSEGIRQWWKLKPGPPPPKPAERHKDDSRGLVLPGYKYLGPFNGLDKGEPVNEADAAALEHDKAYDRQLDSGDNPYLKYNHADAEFQERLKEDTSFGGNLGRAVFQAKKRLLEPLGLVEEAAKTAPGKKRPVEHSPVEPDSSSGTGKAGQQPARKRLNFGQTGDADSVPDPQPIGEPPAAPSGVGSLTMAAGGGAPMADNNEGADGVGNSSGNWHCDSTWMGDRVITTSTRTWALPTYNNHLYKQISNSTSGGSSNDNAYFGYSTPWGYFDFNRFHCHFSPRDWQRLINNNWGFRPKRLSFKLFNIQVKEVTQNEGTKTIANNLTSTIQVFTDSEYQLPYVLGSAHQGCLPPFPADVFMIPQYGYLTLNNGSQAVGRSSFYCLEYFPSQMLKTGNNFQFTYTFEDVPFHSSYAHSQSLDRLMNPLIDQYLYYLSRTQTTGGTTNTQTLGFSQGGPNTMANQAKNWLPGPCYRQQRVSKTSADNNNSEYSWTGATKYHLNGRDSLVNPGPAMASHKDDEEKFFPQSGVLIFGKQGSEKTNVDIEKVMITDEEEIRTTNPVATEQYGSVSTNLQRGNRQAATADVNTQGVLPGMVWQDRDVYLQGPIWAKIPHTDGHFHPSPLMGGFGLKHPPPQILIKNTPVPADPPTTFNQSKLNSFITQYSTGQVSVEIEWELQKENSKRWNPEIQYTSNYYKSTSVDFAVNTEGVYSEPRPIGTRYLTRNL

SEQ ID NO: 182 - protein, 737 aa, Artificial Sequence
  Description of Artificial Sequence: Synthetic polypeptide
MAADGYLPDWLEDTLSEGIRQWWKLKPGPPPPKPAERHKDDSRGLVLPGYKYLGPFNGLDKGEPVNEADAAALEHDKAYDRQLDSGDNPYLKYNHADAEFQERLKEDTSFGGNLGRAVFQAKKRLLEPLGLVEEAAKTAPGKKRPVEHSPVEPDSSSGTGKAGQQPARKRLNFGQTGDADSVPDPQPIGEPPAAPSGVGSLTMAAGGGAPMADNNEGADGVGNSSGNWHCDSTWMGDRVITTSTRTWALPTYNNHLYKQISNSTSGGSSNDNAYFGYSTPWGYFDFNRFHCHFSPRDWQRLINNNWGFRPKRLSFKLFNIQVKEVTQNEGTKTIANNLTSTIQVFTDSEYQLPYVLGSAHQGCLPPFPADVFMIPQYGYLTLNNGSQAVGRSSFYCLEYFPSQMLKTGNNFQFTYTFEDVPFHSSYAHSQSLDRLMNPLIDQYLYYLSRTQTTGGTTNTQTLGFSQGGPNTMANQAKNWLPGPCYRQQRVSKTSADNNNSEYSWTGATKYHLNGRDSLVNPGPAMASHKDDEEKFFPQSGVLIFGKQGSEKTNVDIEKVMITDEEEIRTTNPVATEQYGSVSTNLQQGNTQAATADVNTQGVLPGMVWQDRDVYLQGPIWAKIPHTDGHFHPSPLMGGFGLKHPPPQILIKNTPVPADPPTTFNQSKLNSFITQYSTGQVSVEIEWELQKENSKRWNPEIQYTSNYYKSTSVDFAVNTEGVYSEPRPIGTRYLTRNL

SEQ ID NO: 183 - protein, 737 aa, Artificial Sequence
  Description of Artificial Sequence: Synthetic polypeptide
MAADGYLPDWLEDTLSEGIRQWWKLKPGPPPPKPAERHKDDSRGLVLPGYKYLGPFNGLDKGEPVNEADAAALEHDKAYDRQLDSGDNPYLKYNHADAEFQERLKEDTSFGGNLGRAVFQAKKRLLEPLGLVEEAAKTAPGKKRPVEHSPVEPDSSSGTGKAGQQPARKRLNFGQTGDADSVPDPQPIGEPPAAPSGVGSLTMAAGGGAPMADNNEGADGVGNSSGNWHCDSTWMGDRVITTSTRTWALPTYNNHLYKQISNSTSGGSSNDNAYFGYSTPWGYFDFNRFHCHFSPRDWQRLINNNWGFRPKRLSFKLFNIQVKEVTQNEGTKTIANNLTSTIQVFTDSEYQLPYVLGSAHQGCLPPFPADVFMIPQYGYLTLNNGSQAVGRSSFYCLEYFPSQMLRTGNNFQFTYTFEDVPFHSSYAHSQSLDRLMNPLIDQYLYYLSRTQTTGGTTNTQTLGFSQGGPNTMANQAKNWLPGPCYRQQRVSKTSADNNNSEYSWTGATKYHLNGRDSLVNPGPAMASHKDDEEKFFPQSGVLIFGKQGSEKTNVDIEKVMITDEEEIRTTNPVATEQYGSVSTNLQQGNTQAATADVNTQGVLPGMVWQDRDVYLQGPIWAKIPHTDGHFHPSPLMGGFGLKHPPPQILIKNTPVPADPPTTFNQSKLNSFITQYSTGQVSVEIEWELQKENSKRWNPEIQYTSNYYKSTSVDFAVNTEGVYSEPRPIGTRYLTRNL

SEQ ID NO: 184 - protein, 729 aa, Adeno-associated virus
MAADGYLPDWLEDNLSEGIREWWDLKPGAPKPKANQQKQDDGRGLVLPGYKYLGPFNGLDKGEPVNAADAAALEHDKAYDQQLKAGDNPYLRYNHADAEFQERLQEDTSFGGNLGRAVFQAKKRVLEPLGLVEEGAKTAPGKKRPIDSPDSSTGIGKKGQQPAKKKLNFGQTGDSESVPDPQPLGEPPAAPSSVGSGTMAAGGGAPTADNNEGADGVGNASGNWHCDSTWLGDRVITTSTRTWALPTYNNHLYKQISSSSSGATNDNHYFGYSTPWGYFDFNRFHCHFSPRDWQRLINNNWGFRPKKLRFKLFNIQVKEVTTNDGVTTIANNLTSTVQVFSDSEYQLPYVLGSAHQGCLPPFPADVFMIPQYGYLTLNNGSQSVGRSSFYCLEYFPSQMLRTGNNFEFSYSFEDVPFHSSYAHSQSLDRLMNPLIDQYLYYLARTQSTTGSTRELQFHQAGPNTMAEQSKNWLPGPCYRQQRLSKNLDFNNNSNFAWTAATKYHLNGRNSLTNPGIPMATNKDDEDQFFPINGVLVFGKTGAANKTTLENVLMTSEEEIKTTNPVATEEYGVVSSNLQSSTAGPQSQTINSQGALPGMVWQNRDVYLQGPIWAKIPHTDGNFHPSPLMGGFGLEHPPPQILIKNTPVPANPPEVFTPAKFASFITQYSTGQVSVEIEWELQKENSKRWNPEIQYTSNYAKSNNVEFAVNPDGVYTEPRPIGTRYLTRNL

SEQ ID NO: 185 - DNA, 3075 bp, Adeno-associated virus
tgagaactttcctttcaacgattgcgtcggacaagatggtgatctggtgggaggaggggaagatgaccgccaaggtcgtggagtcggccaaagccattcttggaggaagcaaggtgcgtgtggaccagaaatgcaagtcctcggcccagatagacccgactcccgtgatcgtcacctccaacaccaacatgtgcgccgtgattgacgggaactcaacgaccttcgagcaccagcagccgttgcaagaccggatgttcaaatttgaacttacccgccgtctggatcatgactttggaaaggtcaccaagcaggaagtgaaagactttttccggtgggcaaaggatcacgtggttgaggtggagcatgaattctacgtcaaaaagggtggagctaagaaaagacccgcccccagtgacgcagatataagtgagcccaaacgggcgcgcgagtcagttgcgcagccatcaacgtcagacgcggaagcttcgatcaactacgcggacaggtaccaaaaacaaatgttctcgtcacgtgggcatgaatctgatgctgtttccctgcagacaatgcgagagaatgaatcagaattcaaatatctgcttcactcacggacagaaagactgtttagagtgctttcccgtgtcagaatctcaacccgtttctgtcgtcaaaaaggcgtatcagaaactgtgctacattcatcatatcatgggaaaggtgccagacgcttgcactgcctgcgatctggtcaatgtggatttggatgactgcatctctgaacaataaatgatttaaatcaggtatggctgccgatggttatcctccagattggctcgaggacactctctctgaagggataagacagtggtggaagctcaaacctggcccaccaccaccaaagcccgcagagcggcataaggacgacagcaggggtcttgtgcttcctgggtacaagtacctcggacccttcaacggactcgacaagggggagccggtcaacgaggcagacgccgcggccctcgagcacgacaaggcctacgaccggcagctcgacagcggagacaacccgtacctcaagtacaaccacgccgacgcagagtttcaggagcgccttaaagaagatacgtcttttgggggcaacctcggacgagcagtcttccaggcgaaaaagagggttcttgaacctctgggcctggttgaggaacctgttaagacggctccgggaaaaaagaggccggtagagcactctcctgtggagccagactcctcctcgggaaccggaaaagcgggccagcggcctgcaagaaaaagattaaattttggtcagactggagacgcagactccgtacctgacccccagcctctcggacagccaccagcagccccctctggtctgggatctactacaatggctacaggcagtggcgcaccaatggcagacaataacgagggtgccgatggagtgggtaattcctcaggaaattggcattgcgattcccaatggctgggcgacagagtcatcaccaccagcacccgaacctgggccctgcccacatacaacaaccacctctacaagcaaatctccagccaatcaggagccagcaacgacaaccactactttggctacagcaccccctgggggtattttgacttcaacagattccactgccacttttcaccacgtgactggcaaagactcatcaacaacaactggggattccggcccaaaagactcaacttcaagctctttaatattcaagtcaaagaggtcacgcagaatgacggtacgacgacgattgccaataaccttaccagcacggttcaggtgtttactgactcggagtaccagctcccgtacgtcctgggctcggcgcatcaaggatgcctcccgccgtttccagcggacgtcttcatggtcccacagtatggatacctcaccctgaacaacgggagtcaggcggtaggacgctcttccttttactgcctggagtactttccttctcagatgctgcgtactggaaacaactttcagttcagctacacttttgaagacgtgcctttccacagcagctacgctcacagccagagtctggatcggctgatgaatcctctgatcgaccagtacctgtattatctgaacaagacacaaacaaatagtggaactcttcagcagtctcggctactgtttagccaagctggaccaaccaacatgtctcttcaagctaaaaactggctgcctggaccttgctacagacagcagcgtctgtcaaaacaggcaaacgacaacaacaacagcaactttccctggactgcagctacaaagtatcatctaaatggccgggactcgttggttaatccaggaccagctatggccagtcacaaggatgacgaagaaaagtttttccccatgcatggaaccctgatatttggtaaacaaggaacaaatgccaacgacgcggatttggaaaatgtcatgattacagatgaagaagaaatcagggccaccaatcccgtggctacggagcagtacgggactgtgtcaaataatttgcaaaactcaaacactggtccaactactggaactgtcaatcgccaaggagcgttacctggtatggtgtggcaggatcgagacgtgtacctgcagggacccatttgggccaagattcctcacaccgatggacactttcatccttctccactgatgggaggttttggactcaaacacccgcctcctcagatcatgatcaaaaacactcccgttccagccaatcctcccacaaacttcagttctgccaagtttgcttctttcatcacacagtattccacgggacaggtcagcgtggagatcgagtgggagctgcagaaggagaacagcaaacgctggaatcccgaaattcagtacacttccaactacaacaagtctgttaatgtggactttactgtggacactaatggtgtgtattcagagcctcgccccattggcaccagatacctgactcgtaatctgtaattgcttgttaatcaataaaccgtttaattcgtttcagttgaactttggtctctgcgaagggcgaa

SEQ ID NO: 186 - DNA, 3142 bp, Adeno-associated virus
aaaacgacgggccagtgattgtaatacgactcactatagggcgaaattgaaattagcggccgcgaattcgcctttcgcagagaccaaagttcaactgaaacgaattaaacggtttattgattaacaagcaattacagattacgagtcaggtatctggtgccaatggggcgaggctctgaatacacaccattagtgtccacagtaaagtccacattaacagacttgttgtagttggaagtgtactgaatttcgggattccagcgtttgctgttctccttctgcagctcccactcgatctccacgctgacctgtcccgtggaatactgtgtgatgaaagaagcaaacttggcagaactgaagtttgtgggaggattggctggaacgggagtgtttttgatcatgatctgaggaggcgggtgtttgagtccaaaacctcccatcagtggagaaggatgaaagtgtccatcggtgtgaggaatcttggcccaaatgggtccctgcaggtacacgtctcgatcctgccacaccataccaggtaacgctccttggtgattgacagttccagtagttggaccagtgtttgagttttgcaaattatttgacacagtcccgtactgctccgtagccacgggattggtggccctgatttcttcttcatctgtaatcatgacattttccaaatccgcgtcgttggcatttgttccttgtttaccaaatatcagggttccatgcatggggaaaaacttttcttcgtcatccttgtgactggccatagctggtcctggattaaccaacgagtcccggccatttagatgatactttgtagctgcagtccagggaaagttgctgttgttgttgtcgtttgcctgttttgacagacgctgctgtctgtagcaaggtccaggcagccagtttttagcttgaagagacatgttggttggtccagcttggctaaacagtagccgagactgctgaagagttccactatttgtttgtgtcttgttcagataatacaggtactggtcgatcagaggattcatcagccgatccagactctggctgtgagcgtagctgctgtggaaaggcacgtcttcaaaagtgtagctgaactgaaagttgtttccagtacgcagcatctgagaaggaaagtactccaggcagtaaaaggaagagcgtcctaccgcctgactcccgttgttcagggtgaggtatccatactgtgggaccatgaagacgtccgctggaaacggcgggaggcatccttgatgcgccgagcccaggacgtacgggagctggtactccgagtcagtaaacacctgaaccgtgctggtaaggttattggcaatcgtcgtcgtaccgtcattctgcgtgacctctttgacttgaatattaaagagcttgaagttgagtcttttgggccggaatccccggttgttgttgacgagtctttgccagtcacgtggtgaaaagtggcagtggaatctgttgaagtcaaaatacccccagggggtgctgtagccaaagtagtggttgtcgttgctggctcctgattggctggagatttgcttgtagaggtggttgttgtatgtgggcagggcccaggttcgggtgctggtggtgatgactctgtcgcccagccattgggaatcgcaatgccaatttcctgaggaattacccactccatcggcaccctcgttattgtctgccattggtgcgccactgcctgtagccattgtagtagatcccagaccagagggggctgctggtggctgtccgagaggctgggggtcaggtacggagtctgcgtctccagtctgaccaaaatttaatctttttcttgcaggctgctggcccgcttttccggttcccgaggaggagtctggctccacaggagagtgctctaccggcctcttttttcccggagccgtcttaacaggctcctcaaccaggcccagaggttcaagaaccctctttttcgcctggaagactgctcgtccgaggttgcccccaaaagacgtatcttctttaaggcgctcctgaaactctgcgtcggcgtggttgtacttgaggtacgggttgtctccgctgtcgagctgccggtcgtaggccttgtcgtgctcgagggccgcggcgtctgcctcgttgaccggctcccccttgtcgagtccgttgaagggtccgaggtacttgtacccaggaagcacaagacccctgctgtcgtccttatgccgctctgcgggctttggtggtggtgggccaggtttgagcttccaccactgtcttattccttcagagagagtgtcctcgagccaatctggaagataaccatcggcagccatacctgatttaaatcatttattgttcagagatgcagtcatccaaatccacattgaccagatcgcaggcagtgcaagcgtctggcacctttcccatgatatgatgaatgtagcacagtttctgatacgcctttttgacgacagaaacgggttgagattctgacacgggaaagcactctaaacagtctttctgtccgtgagtgaagcagatatttgaattctgattcattctctcgcattgtctgcagggaaacagcatcagattcatgcccacgtgacgagaacatttgttttggtacctgtccgcgtagttgatcgaagcttccgcgtctgacgtcgatggctgcgcaactgactcgcgcgcccgtttgggctcacttatatctgcgtcactgggggcgggtcttttcttagctccaccctttttgacgtagaattcatgctccacctcaaccacgtgatcctttgcccaccggaaaaagtctttcacttcctgcttggtgacctttccaaagtcatgatccagacggcgggtaagttcaaatttgaacatccggtcttgcaacggctgctggtgctcgaaggtcgttgagttcccgtcaatcacggcgcacatgttggtgttggaggtgacgatcacgggagtcgggtctatctgggccgaggacttgcatttctggtccacacgcaccttgcttcctccaagaatggctttggccgactccacgaccttggcggtcatcttcccctcctcccaccagatcaccatcttgtcgacgcaatggtaaaaggaaagttctcattgg

SEQ ID NO: 187 - protein, 735 aa, Adeno-associated virus 2
MAADGYLPDWLEDTLSEGIRQWWKLKPGPPPPKPAERHKDDSRGLVLPGYKYLGPFNGLDKGEPVNEADAAALEHDKAYDRQLDSGDNPYLKYNHADAEFQERLKEDTSFGGNLGRAVFQAKKRVLEPLGLVEEPVKTAPGKKRPVEHSPVEPDSSSGTGKAGQQPARKRLNFGQTGDADSVPDPQPLGEPPATPAAVGPTTMASGGGAPMADNNEGADGVGNASGNWHCDSTWLGDRVITTSTRTWALPTYNNHLYKQISSASTGASNDNHYFGYSTPWGYFDFNRFHCHFSPRDWQRLINNNWGFRPKRLNFKLFNIQVKEVTQNDGTTTIANNLTSTVQVFTDSEYQLPYVLGSAHQGCLPPFPADVFMIPQYGYLTLNNGSQAVGRSSFYCLEYFPSQMLRTGNNFTFSYTFEDVPFHSSYAHSQSLDRLMNPLIDQYLYYLNRTQNQSGSAQDKALLFSRGSPAGMSVQPKNWLPGPCYRQQRVSKTKTDNNNSNFTWTGASKYNLNGRESIINPGTAMASHKDDKDKFFPMSGVMIFGKESAGASNTALDNVMITDEEEIKATNPVATERFGTVAVNFQSSSTDPATGDVHVMGALPGMVWQDRDVYLQGPIWAKIPHTDGHFHPSPLMGGFGLKHPPPQILIKNTPVPANPPAEFSATKFASFITQYSTGQVSVEIEWELQKENSKRWNPEVQYTSNYAKSANVDFTVDNNGLYTEPRPIGTRYLTRP

SEQ ID NO: 188 - protein, 740 aa, Adeno-associated virus 2
MAADGYLPDWLEDTLSEGIRQWWKLKPGPPPPKPAERHKDDSRGLVLPGYKYLGPFNGLDKGEPVNAADAAALEHDKAYDRQLDSGDNPYLKYNHADAEFQERLKEDTSFGGNLGRAVFQAKKRVLEPLGLVEEPVKTAPGKKRPVEHSPVEPDSSSGTGKAGQQPARKRLNFGQTGDADSVPDPQPLGQPPAAPSGLGTNTMATGSGAPMADNNEGADGVGNSSGNWHCDSTWMGDRVITTSTRTWALPTYNNHLYKQISSQSGASNDNHYFGYSTPWGYFDFNRFHCHFSPRDWQRLINNNWGFRPKRLNFKLFNIQVKEVTQNDGTTTIANNLTSTVQVFTDSEYQLPYVLGSAHQGCLPPFPADVFMVPQYGYLTLNNGSQAVGRSSFYCLEYFPSQMLRTGNNFTFSYTFEDVPFHSSYAHSQSLDRLMNPLIDQYLYYLSRTNTPSGTTTQSGLQFSQAGASDIRDQSRNWLPGPCYRQQRVSKTSADNNNSEYSWTGATKYHLNGRDSLVNPGPAMASHKDDEEKFFPQSGVLIFGKQGSEKTNVDIEKVMITDEEEIRTTNPVATEQYGSVSTNLQRGNRQAATADVNTQGVLPGMVWQDRDVYLQGPIWAKIPHTDGHFHPSPLMGGFGLKHPPPQILIKNTPVPANPSTTFSAAKFASFITQYSTGQVSVEIEWELQKENSKRWNPEIQYTSNYNKSVNVDFTVDTNGVYSEPRPIGTRYLTRNLLLAAA

SEQ ID NO: 189 - protein, 734 aa, Adeno-associated virus 2
MAADGYLPDWLEDTLSEGIRQWWKLKPGPPPPKPAERHKDDSRGLVLPGYKYLGPFNGLDKGEPVNEADAAALEHDKAYDRQLDSGDNPYLKYNHADAEFQERLKEDTSFGGNLGRAVFQAKKRVLEPLGLVEEPVKTAPGKKRPVEHSPVEPDSSSGTGKAGQQPARKRLNFGQTGDADSVPDPQPLGQPPAAPSGLGTNTMATGSGAPMADNNEGADGVGNSSGNWHCDSTWMGDRVITTSTRTWALPTYNNHLYKQISSQSGASNDNHYFGYSTPWGYFDFNRFHCHFSPRDWQRLINNNWGFRPKRLNFKLFNIQVKEVTQNDGTTTIANNLTSTVQVFTDSEYQLPYVLGSAHQGCLPPFPADVFMVPQYGYLTLNNGSQAVGRSSFYCLEYFPSQMLRTGNNFTFSYTFEDVPFHSSYAHSQSLDRLMNPLIDQYLYYLSRTNTPSGTTTQSGLQFSQAGASDIRDQSRNWLPGPCYRQQRVSKTSADNNNSEYSWTGATMYHLNGRDSLVNPGPAMASHKDDEEKFFPQSGVLIFGKQGSEKTNVDIEKVMITDEEEIRTTNPVATEQYGSVSTNLQRGNRQAATADVNTQGVLPGMVWQDRDVYLQGPIWAKIPHTDGHFHPSPLMGGFGLKHPPPQILIKNTPVPANPSTTFSAAKFASFITQYSTGQVSVEIEWELQKENSKRWNPEIQYTSNYNKSINVDFTVDTNGVYSEPRPIGTRYLTRN

SEQ ID NO: 190 - protein, 734 aa, Adeno-associated virus 2
MAADGYLPDWLEDTLSEGIRQWWKLKPGPPPPKPAERHKDDSRGLVLPGYKYLGPFNGLDKGEPVNEADAAALEHDKAYDRQLDSGDNPYLKYNHADAEFQERLKEDTSFGGNLGRAVFQAKKRVLEPLGLVEEPVKTAPGKKRPVEHSPVEPDSSSGTGKAGQQPARKRLNFGQTGDADSVPDPQPLGQPPAAPSGLGTNTMATGSGAPMADNNEGADGVGNSSGNWHCDSTWMGDRVITTSTRTWALPTYNNHLYKQISSQSGASNDNHYFGYSTPWGYFDFNRFHCHFSPRDWQRLINNNWGFRPKRLNFKLFNIQVKEVTQNDGTTTIANNLTSTVQVFTDSEYQLPYVLGSAHQGCLPPFPADVFMVPQYGYLTLNNGSQAVGRSSFYCLEYFPSQMLRTGNNFTFSYTFEDVPFHSSYAHSQSLDRLMNPLIDQYLYYLSRTNTPSGTTTQSGLQFSQAGASDIRDQSRNWLPGPCYRQQRVSKTSADNNNSEYSWTGATKYHLNGRDSLVNPGPAMASHKDDEEKFFPQSGVLIFGKQGSEKTNVDIEKVMITDEEEIRTTNPVATEQYGSVSTNLQRGNRQAATADVNTQGVLPGMVWQDRDVYLQGPIWAKIPHTDGHFHPSPLMGGFGLKHPPPQILIKNTPVPANPSTTFSEAKFASFITQYSTGQVSVEIEWELQKENSKRWNPEIQYTSNYNKSVNVDFTVDTNGVYSEPRPIGTRYLTRN

SEQ ID NO: 191 - protein, 739 aa, Adeno-associated virus 2
MAADGYLPDWLEDTLSEGIRQWWKLKPGPPPPKPAERHKDDSRGLVLPGYKYLGPFNGLDKGEPVNEADAAALEHDKAYDRQLDSGDNPYLKYNHADAEFQERLKEDTSFGGNLGRAVFQAKKRVLEPLGLVEEPVKTAPGKKRPVEHSPVEPDSSSGTGKAGQQPARKRLNFGQTGDADSVPDPQPLGQPPAAPSGLGTNTMATGSGAPMADNNEGADGVGNSSGNWHCDSTWMGDRVITTSTRTWALPTYNNHLYKQISSQSGASNDNHYFGYSTPWGYFDFNRFHCHFSPRDWQRLINNNWGFRPKRLNFKLFNIQVKEVTQNDGTTTIANNLTSTVQVFTDSEYQLPYVLGSAHQGCLPPFPADVFMVPQYGYLTLNNGSQAVGRSSFYCLEYFPSQMLRTGNNFTFSYTFEDVPFHSSYAHSQSLDRLMNPLIDQYLYYLSRTNTPSGTTTQSGLQFSQAGASDIRDQSRNWLPGPCYRQQRVSKTSADNNNSEYSWTGATKYHLNGRDSLVNPGPAMASHKDDEEKFFPQSGVLIFGKQGSEKTNVDIEKVMITDEEEIRTTNPVATEQYGSVSTNLQRGNRQAATADVNTQGVLPGMVWQDRDVYLQGPIWAKIPHTDGHFHPSPLMGGFGLKHPPPQILIKNTPVPANPSTTFSAAKFASFITQYSTGQVSVEIEWELQKENSKRWNPEIQYTSNYNKSVNVDFTVDTNGVYSEPRPIGTRYLTRNLLLAA

SEQ ID NO: 192 - protein, 725 aa, Adeno-associated virus 2
MAADGYLPDWLEDTLSEGIRQWWKLKPGPPPPKPAERHKDDSRGLVLPGYKYLGPFNGLDKGEPVNEADAAALEHDKAYDRQLDSGDNPYLKYNHADAEFQERLKEDTSFGGNLGRAVFQAKKRVLEPLGLVEEPVKTAPGKKRPVEHSPVEPDSSSGTGKAGQQPARKRLNFGQTGDADSVPDPQPLGQPPAAPSGLGTNTMATGSGAPMADNNEGADGVGNSSGNWHCDSTWMGDRVITTSTRTWALPTYNNHLYKQISSQSGASNDNHYFGYSTPWGYFDFNRFHCHFSPRDWQRLINNNWGFRPKRLNFKLFNIQVKEVTQNDGTTTIANNLTSTVQVFTDSEYQLPYVLGSAHQGCLPPFPADVFMVPQYGYLTLNNGSQAVGRSSFYCLEYFPSQMLRTGNNFTFSYTFEDVPFHSSYAHSQSLDRLMNPLIDQYLYYLSRTNTPSGTTTQSGLQFSQAGASDIRDQSRNWLPGPCYRQQRVSKTSADNNNSEYSWTGATKYHLNGRDSLVNPGPAMASHKDDEEKFFPQSGVLIFGKQGSEKTNVDIEKVMITDEEEIRTTNPVATEQYGSVSTNLQRGNRQAATADVNTQGVLPGMVWQDRDVYLQGPIWAKIPHTDGHFHPSPLMGGFGLKHPPPQILIKNTPVPANPSTTFSAAKFASFITQYSTGQVSVEIEWELQKENSKRWNPEIQYTSNYNKSVNVDFTVDTNGVYSEPRP

SEQ ID NO: 193 - protein, 707 aa, Adeno-associated virus 2
MAADGYLPDWLEDTLSEGIRQWWKLKPGPPPPKPAERHKDDSRGLVLPGYKYLGPFNGLDKGEPVNEADAAALEHDKAYDRQLDSGDNPYLKYNHADAEFQERLKEDTSFGGNLGRAVFQAKKRVLEPLGLVEEPVKTAPGKKRPVEHSPVEPDSSSGTGKAGQQPARKRLNFGQTGDADSVPDPQPLGQPPAAPSGLGTNTMATGSGAPMADNNEGADGVGNSSGNWHCDSTWMGDRVITTSTRTWALPTYNNHLYKQISSQSGASNDNHYFGYSTPWGYFDFNRFHCHFSPRDWQRLINNNWGFRPKRLNFKLFNIQVKEVTQNDGTTTIANNLTSTVQVFTDSEYQLPYVLGSAHQGCLPPFPADVFMVPQYGYLTLNNGSQAVGRSSFYCLEYFPSQMLRTGNNFTFSYTFEDVPFHSSYAHSQSLDRLMNPLIDQYLYYLSRTNTPSGTTTQSGLQFSQAGASDIRDQSRNWLPGPCYRQQRVSKTSADNNNSEYSWTGATKYHLNGRDSLVNPGPAMASHKDDEEKFFPQSGVLIFGKQGSEKTNVDIEKVMITDEEEIRTTNPVATEQYGSCIYQPPERQQTSSYRRCQHTRRSSRHGLAGQRCVPSGAHLGKDSTHGRTFSPLSPHGWIRTTPSSTDSHQEHPGTCESFDHLQCGKVCFLHHTVLHGTGQRGDRVRAAEGKQQTLESRNSVHFQLQQVC

SEQ ID NO: 194 - protein, 739 aa, Adeno-associated virus 2; identical to SEQ ID NO: 191

SEQ ID NO: 195 - protein, 737 aa, Adeno-associated virus 2
MASDGYLPDWLEDNLSEGIREWWDLKPGAPKPKANQQKQDDGRGLVLPGYKYLGPFNGLDKGEPVNAADAAALEHDKAYDQQLKAGDNPYLRYNHADAEFQERLQEDTSFGGNLGRAVFQAKKRVLEPFGLVEEGAKTAPGKKRPVEQSPQEPDSSSGIGKTGQQPAKKRLNFGQTGDSESVPDPQPLGEPPATPAAVGPTTMASGGGAPMADNNEGADGVGNASGNWHCDSTWLGDRVITTSTRTWALPTYNNHLYKQISSASTGASNDNHYFGYSTPWGYFDFNRFHCHFSPRDWQRLINNNWGFRPKRLNFKLFNIQVKEVTTNDGTTTIANNLTSTVQVFTDSEYQLPYVLGSAHQGCLPPFPADVFMVPQYGYLTLNNGSQAVGRSSFYCLEYFPSQMLRTGNNFTFSYTFEDVPFHSSYAHSQSLDRLMNPLIDQYLYYLSRTNTPSGTTTQSGLQFSQAGASDIRDQSRNWLPGPCYRQQRVSKTSADNNNSEYSWTGATKYHLNGRDSLVNPGPAMASHKDDEEKFFPQSGVLIFGKQGSEKTNVDIEKVMITDEEEIRTTNPVATEQYGSVSTNLQRGNRQAATADVNTQGVLPGMVWQDRDVYLQGPIWAKIPHTDGHFHPSPLMGGFGLKHHPPQILIKNTPVPANPSTTFSAAKFASFITQYSTGQVSVEIEWELQKENSKRWNPEIQYTSNYNKSVNVDFTVDTNGVYSEPRPIGTRYLTRNLL

SEQ ID NO: 196 - protein, 741 aa, Adeno-associated virus 2
MAADGYLPDWLEDTLSEGIREWWALKPGAPKPKANQQKQDDGRGLVLPGYKYLGPFNGLDKGEPVNEADAAALEHDKAYDQQLQAGDNPYLRYNHADAEFQERLQEDTSFGGNLGRAVFQAKKRVLEPLGLVEEPVKTAPGKKRPVEHSPVEPDSSSGTGKSGQQPARKRLNFGQTGDADSVPDPQPLGQPPAAPSGLGTNTMATGSGAPMADNNEGADGVGNSSGNWHCDSTWMGDRVITTSTRTWALPTYNNHLYKQISSQSGASNDNHYFGYSTPWGYFDFNRFHCHFSPRDWQRLINNNWGFRPKRLNFKLFNIQVKEVTQNDGTTTIANNLTSTVQVFTDSEYQLPYVLGSAHQGCLPPFPADVFMVPQYGYLTLNNGSQAVGRSSFYCLEYFPSQMLRTGNNFTFSYTFEDVPFHSSYAHSQSLDRLMNPLIDQYLYYLSRTNTPSGTTTQSGLQFSQAGASDIRDQSRNWLPGPCYRQQRVSKTSADNNNSEYSWTGATKYHLNGRDSLVNPGPAMASHKDDEEKFFPQSGVLIFGKQGSEKTNVDIEKVMITDEEEIRTTNPVATEQYGSVSTNLQRGNLANHNNTTNARQAATADVNTQGVLPGMVWQDRDVYLQGPIWAKIPHTDGHFHPSPLMGGFGLKHPPPQILIKNTPVPANPSTTFSAAKFASFITQYSTGQVSVEIEWELQKENSKRWNPEIQYTSNYNKSINVDFTVDTNGVYSEPRPIGTRYL

SEQ ID NO: 197 - protein, 730 aa, Adeno-associated virus 2
MASDGYLPDWLEDNLSEGIREWWDLKPGAPKPKANQQKQDDGRGLVLPGYKYLGPFNGLDKGEPVNAADAAALEHDKAYDQQLKAGDNPYLRYNHADAEFQERLQEDTSFGGNLGRAVFQAKKRVLEPFGLVEEGAKTAPGKKRPVEQSPQEPDSSSGIGKTGQQPAKKRLNFGQTGDSESVPDPQPLGEPPATPAAVGPTTMASGGGAPMADNNEGADGVGNASGNWHCDSTWLGDRVITTSTRTWALPTYNNHLYKQISSASTGASNDNHYFGYSTPWGYFDFNRFHCHFSPRDWQRLINNNWGFRPKRLNFKLFNIQVKEVTTNDGVTTIANNLTSTVQVFSDSEYQLPYVLGSAHQGCLPPFPADVFMIPQYGYLTLNNGSQAVGRSSFYCLEYFPSQMLRTGNNFTFSYTFEDVPFHSSYAHSQSLDRLMNPLIDQYLYYLNRTQNQSGSAQNNDLLFSRGSPAGMSVQPKNWLPGPCYRQQRVSKTKTDNNNSNFTWTGASKYNLNGRESIINPGTAMASHKDDKDKFFPMSGVMIFGKESAGASNTALDNVMITDEEEIKATNPVATERFGTVAVNLQSSSTDPATGDVHVMGALPGMVWQDRDVYLQGPIWAKIPHTDGHFHPSPLMGGFGLKNPPPQILIKNTPVPANPPAEFSATKFASFITQYSTGQVSVEIEWELQKENSKRWNPEVQYTSNYAKSANVDFTVDNNGLYTEPRPIGTR

SEQ ID NO: 198 - protein, 735 aa, Adeno-associated virus 2
  MOD_RES (239)..(239): Xaa can be any naturally occurring amino acid
MASDGYLPDWLEDNLSEGIREWWDLKPGAPKPKANQQKQDDGRGLVLPGYKYLGPFNGLDKGEPVNAADAAALEHDKAYDQQLKAGDNPYLRYNHADAEFQERLQEDTSFGGNLGRAVFQAKKRVLEPFGLVEEGAKTAPGKKRPVEQSPQEPDSSSGIGKTGQQPAKKRLNFGQTGDSESVPDPQPLGEPPATPAAVGPTTMASGGGAPMADNNEGADGVGNASGNWHCDSTWLGDRXITTSTRTWALPTYNNHLYKQISSASTGASNDNHYFGYSTPWGYFDFNRFHCHFSPRDWQRLINNNWGFRPKRLNFKLFNIQVKEVTTNDGVTTIANNLTSTVQVFSDSEYQLPYVLGSAHQGCLPPFPADVFMIPQYGYLTLNNGSQAVGRSSFYCLEYFPSQMLRTGNNFTFSYTFEDVPFHSSYAHSQSLDRLMNPLIDQYLYYLNRTQNQSGSAQNNDLLFSRGSPAGMSVQPKNWLPGPCYRQQRVSKTKTDNNNSNFTWTGASKYNLNGRESIINPGTAMASHKDDKDKFFPMSGVMIFGKESAGASNTALDNVMITDEEEIKATNPVATERFGTVAVNLQSSSTDPATGDVHVMGALPGMVWQDRDVYLQGPIWAKIPHTDGHFHPSPLMGGFGLKNPPPQILIKNTPVPANPPAEFSATKFASFITQYSTGQVSVEIEWELQKENSKRWNPEVQYTSNYAKSANVDFTVDNNGLYTEPRPIGTRYLTRP

SEQ ID NO: 199 - protein, 733 aa, Adeno-associated virus 2
MASDGYLPDWLEDNLSEGIREWWDLKPGAPKPKANQQKQDDGRGLVLPGYKYLGPFNGLDKGEPVNAADAAALEHDKAYDQQLKAGDNPYLRYNHADAEFQERLQEDTSFGGNLGRAVFLAKKRVLEPFGLVEEGAKTAPGKKRPVEQSPQEPDSSSGIGKTGQQPAKKRLNFGQTGDSESVPDPQPLGEPPATPAAVGPTTMASGGGAPMADNNEGADGVGNASGNWHCDSTWLGDRVITTSTRTWALPTYNNHLYKQISSASTGASNDNHYFGYSTPWGYFDFNRFHCHFSPRDWQRLINNNWGFRPKRLNFKLFNIQVKEVTTNDGVTTIANNLTSTVQVFSDSEYQLPYVLGSAHQGCLPPFPADVFMIPQYGYLTLNNGSQAVGRSSFYCLEYFPSQMLRTGNNFTFSYTFEDVPFHSSYAHSQSLDRLMNPLIDQYLYYLNRTQNQSGSAQNNDLLFSRGSPAGMSVQPKNWLPGPCYRQQRVSKTKTDNNNSNFTWTGASKYNLNGRESIINPGTAMASHKDDKDKFFPMSGVMIFGKESAGASNTALDNVMITDEEEIKATNPVATERFGTVAVNLQSSSTDPATGDVHVMGALPGMVWQDRDVYLQGPIWAKIPHTDGHFHPSPLMGGFGLKNPPPQILIKNTPVPANPPAEFSATKFASFITQYSTGQVSVEIEWELQKENSKRWNPEVQYTSNYAKSANVDFTVDNNGLYTEPRPIGTRYLT

SEQ ID NO: 200 - protein, 734 aa, Adeno-associated virus 2
MAADGYLPDWLEDTLSEGIRQWWKLKPGPPPPKPAERHKDDSRGLVLPGCKYLGPFNGLDKGEPVNEADAAALEHDKAYDRQLDSGDNPYLKYNHADAEFQERLKEDTSFGGNLGRAVFQAKKRVLEPLGLVEEPVKTAPGKKRPVEHSPVEPDSSSGTGKAGQQPARKRLNFGQTGDADSVPDPQPLGQPPAAPSGLGTNTMATGSGAPMADNNEGADGVGNSSGNWHCDSTWMGDRVITTSTRTWALPTYNNHLYKQISSQSGASNDNHYFGYSTPWGYFDFNRFHCHFSPRDWQRLINNNWGFRPKRLNFKLFNIQVKEVTQNDGTTTIANNLTSTVQVFSDSEYQLPYVLGSAHQGCLPPFPADVFMIPQYGYLTLNNGSQAVGRSSFYCLEYFPSQMLRTGNNFTFNYTFEDVPFHSSYAHSQSLDRLMNPLIDQYLYYLNRTQNQSGSAQNNDLLFSRGSPAGMSVQPKNWLPGPCYRQQRVSKTKTDNNNSNFTWTGASKYNLNGRESIINPGTAMASHKDDKDKFFPMSGVMIFGKESAGASNTALDNVMITDEEEIKATNPVATERFGTVAVNLQSSSTDPATGDVHVMGALPGMVWQDRDVYLQGPIWAKIPHTDGHFHPSPLMGGFGLKNPPPQILIKNTPVPANPPAEFSATKFASFITQYSTGQVSVEIEWELQKENSKRWNPEVQYTSNYAKSANVDFTVDNNGLYTEPRPIGTRYLTRP

SEQ ID NO: 201 - protein, 734 aa, Adeno-associated virus 2
MAADGYLPDWLEDTLSEGIRQWWKLKPGPPPPKPAERHKDDSRGLVLPGYKYLGPFNGLDKGEPVNEADAAALEHDKAYDRQLDSGDNPYLKYNHADAEFQERLKEDTSFGGNLGRAVFQAKKRVLEPLGLVEEPVKTAPGKKRPVEHSPVEPDSSSGTGKAGQQPARKRLNFGQTGDADSVPDPQPLGQPPAAPSGLGTNTMATGSGAPMADNNEGADGVGNSSGNWHCDSTWMGDRVITTSTRTWALSTYNNHLYKQISSQSGASNDNHYFGYSTPWGYFDFNRFHCHFSPRDWQRLINNNWGFRPKRLNFKLFNIQVKEVTQNDGTTTIANNLTSTVQVFTDSEYQLPYVLGSAHQGCLPPFPADVFMVPQYGYLTLNNGSQAVGRSSFYCLEYFPSQMLRTGNNFTFSYTFEDVPFHSSYAHSQSLDRLMNPLIDQYLYYLSRTNTPSGTTTQSRLQFSQAGASDIRDQSRNWLPGPCYRQQRVSKTSADNNNSEYSWTGATKYHLNGRDSLVNPGPAMASHKDDEEKFFPQSGVLIFGKQGSEKTNVDIEKVMITDEEEIRTTNPVATEQYGSVSTNLQRGNRQAATADVNTQGVLPGMVWQDRDVYLQGPIWAKIPHTDGHFHPSPLMGGFGLKHPPPQILIKNTPVPANPSTTFSAAKFASFITQYSTGQVSVEIEWELQKENSKRWNPEIQYTSNYNKSINVDFTVDTNGVYSEPRPIGTRYLTRN

SEQ ID NO: 202 - protein, 738 aa, Adeno-associated virus 2
MAADGYLPDWLEDTLSEGIRQWWKLKPGPPPPKPAERHKDDSRGLVLPGYKYLGPFNGLDKGEPVNEADAAALEHDKAYDRQLDGGDNPYLKYNHADAEFQERLKEDTSFGGNLGRAVFQAKKRVLEPLGLVEEPVKTAPGKKRPVEHSPVEPDSSSGTGKAGQQPARKRLNFGQTGDADSVPDPQPLGQPPAAPSGLGTNTMATGSGAPMADNNEGADGVGNSSGNWHCDSTWMGDRVITTSTRTWALPTYNNHLYKQISSQSGASNDNHYFGYSTPWGYFDFNRFHCHFSPRDWQRLINNNWGFRPKRLNFKLFNIQVKEVTQNDGTTTIANNLTSTVQVFTDSEYQLPYVLGSAHQGCLPPFPADVFMVPQYGYLTLNNGSQAVGRSSFYCLEYFPSQMLRTGNNFTFSYTFEDVPFHSSYAHSQSLDRLMNPLIDQYLYYLSRTNTPSGTTTQSGLQFSQAGASDIRDQSRNWLPGPCYRQQRVSKTSADNNNSEYSWTGATKYHLNGRDSLVNPGPAMASHKDDEEKFFPQSGVLIFGKQGSEKTNVDIEKVMITDEEEIRTTNPVATEQYGSVSTNLQRGNRQAATADVNTQGVLPGMVWQDRDVYLQGPIWAKIPHTDGHFHPSPLMGGFGLKHPPPQILIKNTPVPANPSTTFSAAKFASFITQYSTGQVSVEIEWELQKENSKRWNPEIQYTSNYNKSVNVDFTVDTNGVYSEPRPIGTRYLTRNLLRP

SEQ ID NO: 203 - DNA, 2208 bp, Adeno-associated virus
atggctgccgatggttatcttccagattggctcgaggacactctctctgaaggaataagacagtggtggaagctcaaacctggcccaccaccaccaaagcccgcagagcggcataaggacgacagcaggggtcttgtgcttcctgggtacaagtacctcggacccttcaacggactcgacaagggggagccggtcaacgaggcagacgccgcggccctcgagcacgacaaggcctacgaccggcagctcgacagcggagacaacccgtacctcaagtacaaccacgccgacgcagagtttcaggagcgccttaaagaagatacgtcttttgggggcaacctcggacgagcagtcttccaggcgaaaaagagggttcttgaacctctgggcctggttgaggaacctgttaagacggctccgggaaaaaagaggccggtagagcactctcctgtggagccagactcctcctcgggaaccggaaaagcgggccagcagcctgcaagaaaaagattaaattttggtcagactggagacgcagactccgtacctgacccccagcctctcggacagccaccagcagccccctctggtctgggatctactacaatggctacaggcagtggcgcaccaatggcagacaataacgagggtgccgatggagtgggtaattcctcaggaaattggcattgcgattcccaatggctgggcgacagagtcatcaccaccagcacccgaacctgggccctgcccacatacaacaaccacctctacaagcaaatctccagccaatcaggagccagcaacgacaaccactactttggctacagcaccccctgggggtattttgacttcaacagattccactgccacttttcaccacgtgactggcaaagactcatcaacaacaactggggattccggcccaaaagactcaacttcaagctctttaatattcaagtcaaagaggtcacgcagaatggcggtacgacgacgattgccaataaccttaccagcacggttcaggtgtttactgactcggagtaccagctcccgtacgtcctgggctcggcgcatcaaggatgcctcccgccgtttccagcggacgtcttcatggtcccacagtatggatacctcaccctgaacaacgggagtcaggcggtaggacgctcttccttttactgcctggagtactttccttctcagatgctgcgtactggaaacaactttcagttcagctacacttttgaagacgtgcctttccacagcagctacgctcacagccagagtctggatcggctgatgaatcctctgatcgaccagtacctgtattatctgaacaagacacaaacaaatagtggaactcttcagcagtctcggctactgtttagccaagctggaccaaccaacatgtctcttcaagctaaaaactggctgcctggaccttgctacagacagcagcgtctgtcaaaacaggcaaacggcaacaacaacagcaactttccctggactgcagctacaaagtatcatctaaatggccgggactcgttggttaatccaggaccagctatggccagtcacaaggatgacgaagaaaagtttttccccatgcatggaaccctgatatttggtaaacaaggaacaaatgccaacgacgcggatttggaaaatgtcatgattacagatgaagaagaaatcagggccaccaatcccgtggctacggagcagtacgggactgtgtcaaataatttgcaaaactcaaacactggtccaactactggaactgtcaatcaccaaggagcgttacctggtatggtgtggcaggatcgagacgtgtacctgcagggacccatttgggccaagattcctcacaccgatggacactttcatccttctccactgacgggaggttttggactcaaacacccgcctcctcagatcatgatcaaaaacactcccgttccagccaatcctcccacaaacttcagttctgccaagtttgcttctttcatcacacagtattccacgggacaggtcagcgtggagatcgagtgggagctgcagaaggagaacagcaaacgctggaatcccgaaattcagtacacttccaactacaacaagtctgttaatgtggactttactgtggacactaatggtgtgtattcagagcctcgccccattggcaccagatacctgactcgtaatctgtaa

SEQ ID NO: 204 - protein, 735 aa, Adeno-associated virus
MAADGYLPDWLEDTLSEGIRQWWKLKPGPPPPKPAERHKDDSRGLVLPGYKYLGPFNGLDKGEPVNEADAAALEHDKAYDRQLDSGDNPYLKYNHADAEFQERLKEDTSFGGNLGRAVFQAKKRVLEPLGLVEEPVKTAPGKKRPVEHSPVEPDSSSGTGKAGQQPARKRLNFGQTGDADSVPDPQPLGQPPAAPSGLGSTTMATGSGAPMADNNEGADGVGNSSGNWHCDSQWLGDRVITTSTRTWALPTYNNHLYKQISSQSGASNDNHYFGYSTPWGYFDFNRFHCHFSPRDWQRLINNNWGFRPKRLNFKLFNIQVKEVTQNGGTTTIANNLTSTVQVFTDSEYQLPYVLGSAHQGCLPPFPADVFMVPQYGYLTLNNGSQAVGRSSFYCLEYFPSQMLRTGNNFQFSYTFEDVPFHSSYAHSQSLDRLMNPLIDQYLYYLNKTQTNSGTLQQSRLLFSQAGPTNMSLQAKNWLPGPCYRQQRLSKQANGNNNSNFPWTAATKYHLNGRDSLVNPGPAMASHKDDEEKFFPMHGTLIFGKQGTNANDADLENVMITDEEEIRATNPVATEQYGTVSNNLQNSNTGPTTGTVNHQGALPGMVWQDRDVYLQGPIWAKIPHTDGHFHPSPLTGGFGLKHPPPQIMIKNTPVPANPPTNFSSAKFASFITQYSTGQVSVEIEWELQKENSKRWNPEIQYTSNYNKSVNVDFTVDTNGVYSEPRPIGTRYLTRNL

SEQ ID NO: 205 - DNA, 2208 bp, Adeno-associated virus
atggctgccgatggttatcttccagattggctcgaggacactctctctgaaggaataagacagtggtggaagctcaaacctggcccaccaccaccaaagctcgcagagcggcatcaggacgacagcaggggtcttgtgcttcctgggtacaagtacctcggacccttcaacggactcgacaaaggagagccggtcaacgaggcagacgccgcggccctcgagcacgacaaggcctacgaccggcagctcgacagcggagacaacccgtacctcaagtacaaccacgccgacgcggagtttcaggagcgtcttaaagaagatacgtcttttgggggcaacctcggacgagcagtcttccaggcgaaaaagagggttcttgaacctctgggcctggttgaggaacctgttaagacggctccgggaaaaaagaggccggtagagcactctcctgtggagccagactcctcctcgggaaccggaaaggcgggccatcagcctgcgagaaagagattgaattttggtcagactggagacgcagactccgtacctgacccccagcctctcggacagccaccagcagcccccacaagtctgggatctactacaatggctacaggcagtggcgcaccaatggcagacaataacgagggtgccgatggagtgggtaattcctcaggaaattggcattgcgattcccaatggctgggcgacagagtcatcaccaccagcacccgaacctgggccctgcccacctacaacaaccacctctacaagcaaatctccagccaatcaggagcctcgaacgacaaccactactttggctacagcaccccctgggggtattttgacttcaacagattccactgtcacttctccccacgtgattggcaaagactcatcaacaacaactggggattccgacccaagagactcaacttcaagctctttaacattcaagtcaaagaggtcacgcagaatgacggtacgacgacgattgccaataaccttaccagcacggttcaggtgtttactgactcggagtaccagctcccgtacgtcctcggctcggcgcatcaaggatgcctcccgccgtttccagcggacgtcttcacggtcccacagtatggatacctcaccctgaacaacgggagtcaggcggtaggacgctcttccttttactgcctggagtactttccttctcagatgctgcgtactggaaacaaccttaccttcagctacacctttgaggacgttcctttccacagcagctacgctcacagccagagtttggaccggctgatgaatcctctgatcgaccagtatctatattatctgaacaggacacaatcaaatagtggaactcttcagcagtctaggctactgtttagccaagctggacccaccagcatgtctcttcaagctaaaaactggctgcctggaccttgctacagacagcagcgtctttcaaagcaggcaaacgacaacaacaacagcaactttccctggactgcggctacaaagtatcatctaaatggccgggactcgttggttaatccaggaccagctatggccagccacaaagacgatgaagaaaagtttttccccatgcatggaaccctgatatttggtaaacaaggaacaaatgctaacgacgcggatttggagcatgttatgattacagatgaagaagaaatcaggaccaccaatcctgtggctacagagcagtacggaaacgtgtcaaataatttgcaaaactcaaatactggtccaactacagaaaatgtcaatcaccagggagcgttacctggtatggtgtggcaggatcgagacgtgtacctgcagggacccatttgggccaagattcctcacaccgacggacactttcacccttctccactgatgggaggttttggactcaaacacccgcctcctcaaatcatgatcaaaaacactcccgttccagccaatcctcccacaaactacagttctgccaagtttgcttctttcatcacacagtattccacgggccaggtcagcgtggagattgagtgggagctgcggaaggagaacagcaaacgctggaaccccgagatccagtatacttccaactacaacaaatctgttaatgtggactttactgtggacactaatggtgtgtattcagagcctcgccccattggcaccagatacctgactcgtaatctgtaa

SEQ ID NO: 206 - protein, 735 aa, Adeno-associated virus
MAADGYLPDWLEDTLSEGIRQWWKLKPGPPPPKLAERHQDDSRGLVLPGYKYLGPFNGLDKGEPVNEADAAALEHDKAYDRQLDSGDNPYLKYNHADAEFQERLKEDTSFGGNLGRAVFQAKKRVLEPLGLVEEPVKTAPGKKRPVEHSPVEPDSSSGTGKAGHQPARKRLNFGQTGDADSVPDPQPLGQPPAAPTSLGSTTMATGSGAPMADNNEGADGVGNSSGNWHCDSQWLGDRVITTSTRTWALPTYNNHLYKQISSQSGASNDNHYFGYSTPWGYFDFNRFHCHFSPRDWQRLINNNWGFRPKRLNFKLFNIQVKEVTQNDGTTTIANNLTSTVQVFTDSEYQLPYVLGSAHQGCLPPFPADVFTVPQYGYLTLNNGSQAVGRSSFYCLEYFPSQMLRTGNNLTFSYTFEDVPFHSSYAHSQSLDRLMNPLIDQYLYYLNRTQSNSGTLQQSRLLFSQAGPTSMSLQAKNWLPGPCYRQQRLSKQANDNNNSNFPWTAATKYHLNGRDSLVNPGPAMASHKDDEEKFFPMHGTLIFGKQGTNANDADLEHVMITDEEEIRTTNPVATEQYGNVSNNLQNSNTGPTTENVNHQGALPGMVWQDRDVYLQGPIWAKIPHTDGHFHPSPLMGGFGLKHPPPQIMIKNTPVPANPPTNYSSAKFASFITQYSTGQVSVEIEWELRKENSKRWNPEIQYTSNYNKSVNVDFTVDTNGVYSEPRPIGTRYLTRNL

SEQ ID NO: 207 - DNA, 2208 bp, Adeno-associated virus
atggctgccgatggttatcttccagattggctcgaggacactctctctgaaggaataagacagtggtggaagctcaaacctggcccaccaccaccaaagcccgcagagcggcatcaggacgacagcaggggtcttgtgcttcctgggtacaagtacctcggacccttcaacggactcgacaaaggagagccggtcaacgaggcagacgccgcggccctcgagcacgacaaggcctacgaccggcagctcgacagcggagacaacccgtacctcaagtacaaccacgccgacgcggagtttcaggagcgtcttaaagaagatacgtcttttgggggcaacctcggacgagcagtcttccaggcgaaaaagagggttcttgaacctctgggcctggttgaggaacctgttaagacggctccgggaaaaaagaggccggtagagcactctcctgtggagccagactcctcctcgggaaccggaaaagcgggccatcagcctgcgagaaagagattgaattttggtcagactggagacgcagactccgtacctgacccccagcctctcggacagccaccagcagcccccacaagtttgggatctactacaatggctacaggcagtggcgcaccaatggcagacaataacgagggtgccgatggagtgggtaattcctcaggaaattggcattgcgattcccaatggctgggcgacagagtcatcaccaccagcacccgaacctgggccctgcccacctacaacaaccacctctacaagcaaatctccagccaatcaggagcctcgaacgacaaccactactttggctacagcaccccctgggggtattttgacttcaacagattccactgtcacttctccccacgtgattggcaaagactcatcaacaacaactggggattccgacccaagagactcaacttcaagctctttaacattcaagtcaaggaggtcacgcagaatgacggtacgacgacgattgccaataaccttaccagcacggttcaggtgtttactgactcggagtaccagctcccgtacgtcctcggctcggcgcatcaaggatgcctcccgccgtttccagcggacgtcttcatggtcccacagtatggatacctcaccctgaacaacgggagtcaggcggtaggacgctcttccttttactgcctggagtactttccttctcagatgctgcgtactggaaacaactttaccttcagctacacctttgaggacgttcctttccacagcagctacgctcacagccagagtttggaccggctgatgaatcctctgatcgaccagtatctatattatctgaacaggacacaatcaaatagtggaactcttcagcagtctaggctactgtttagccaagctggacccaccagcatgtctcttcaagctaaaaactggctgcctggaccttgctacagacagcagcgtctttcaaagcaggcaaacgacaacaacaacagcaactttccctggactgcggctacaaagtatcgtctaaatggccgggactcgttggttaatccaggaccagctatggccagccacaaagacgatgaagaaaagtttttccccatgcatggaaccctgatatttggtaaacaaggaacaaatgctaacgacgcggatttggagcatgttatgattacagatgaagaagaaatcaggaccaccaatcctgtggctacagagcagtacggaaacgtgtcaaataatttgcaaaactcaaatactggtccaactacagaaaatgtcaatcaccagggagcgttacctggtatggtgtggcaggatcgagacgtgtacctgcagggacccatttgggccaagattcctcacaccgacggacactttcacccttctccactgatgggaggttttggactcaaacacccgcctcctcaaatcatgatcaaaaacactcccgttccagccaatcctcccacaaacttcagttctgccaagtttgcttctttcatcacacagtattccacgggccaggtcagcgtggagattgagtgggagctgcagaaggagaacagcaaacgctggaaccccgagatccagtatacttccaactacaacaaatctgttaatgtggactttactgtggacactaatggtgtgtattcagagcctcgccccattggcaccagatacctgactcgtaatctgtaa

SEQ ID NO: 208 - protein, 735 aa, Adeno-associated virus
MAADGYLPDWLEDTLSEGIRQWWKLKPGPPPPKPAERHQDDSRGLVLPGYKYLGPFNGLDKGEPVNEADAAALEHDKAYDRQLDSGDNPYLKYNHADAEFQERLKEDTSFGGNLGRAVFQAKKRVLEPLGLVEEPVKTAPGKKRPVEHSPVEPDSSSGTGKAGHQPARKRLNFGQTGDADSVPDPQPLGQPPAAPTSLGSTTMATGSGAPMADNNEGADGVGNSSGNWHCDSQWLGDRVITTSTRTWALPTYNNHLYKQISSQSGASNDNHYFGYSTPWGYFDFNRFHCHFSPRDWQRLINNNWGFRPKRLNFKLFNIQVKEVTQNDGTTTIANNLTSTVQVFTDSEYQLPYVLGSAHQGCLPPFPADVFMVPQYGYLTLNNGSQAVGRSSFYCLEYFPSQMLRTGNNFTFSYTFEDVPFHSSYAHSQSLDRLMNPLIDQYLYYLNRTQSNSGTLQQSRLLFSQAGPTSMSLQAKNWLPGPCYRQQRLSKQANDNNNSNFPWTAATKYRLNGRDSLVNPGPAMASHKDDEEKFFPMHGTLIFGKQGTNANDADLEHVMITDEEEIRTTNPVATEQYGNVSNNLQNSNTGPTTENVNHQGALPGMVWQDRDVYLQGPIWAKIPHTDGHFHPSPLMGGFGLKHPPPQIMIKNTPVPANPPTNFSSAKFASFITQYSTGQVSVEIEWELQKENSKRWNPEIQYTSNYNKSVNVDFTVDTNGVYSEPRPIGTRYLTRNL

SEQ ID NO: 209 - DNA, 2208 bp, Adeno-associated virus
atggctgccgatggttatcttccagattggctcgaggacactctctctgaaggaataagacagtggtggaagctcaaacctggcccaccaccaccaaagcccgcagagcggcatcaggacgacagcaggggtcttgtgcttcctgggtacaagtacctcggacccttcaacggactcgacaaaggagagccggtcaacgaggcagacgccgcggccctcgagcacgacaaggcctacgaccggcagctcgacagcggagacaacccgtacctcaagtacaaccacgccgacgcggagtttcaggagcgtcttaaagaagatacgtcttttgggggcaacctcggacgagcagtcttccaggcgaaaaagagggttcttgaacctctgggcctggttgaggaacctgttaagacggctccgggaaaaaagaggccggtagagcactctcctgtggagccagactcctcctcgggaaccggaaaagcgggccatcagcctgcgagaaagagattgaattttggtcagactggagacgcagactccgtacctgacccccagcctctcggacagccaccagcagcccccacaagtttgggatctactacaatggctacaggcagtggcgcaccaatggcagacaataacgagggtgccgatggagtgggtaattcctcaggaaattggcattgcgattcccaatggctgggcgacagagtcatcaccaccagcacccgaacctgggccctgcccacctacaacaaccacctctacaagcaaatctccagccaatcaggagcctcgaacgacaaccactactttggctacagcaccccctgggggtattttgacttcaacagattccactgtcacttctccccacgtgattggcaaagactcatcaacaacaactggggattccgacccaagagactcaacttcaagctctttaacattcaagtcaaagaggtcacgcagaatgacggtacgacgacgattgccaataaccttaccagcacggttcaggtgtttactgactcggagtaccagctcccgtacgtcctcggctcggcgcatcaaggatgcctcccgccgtttccagcggacgtcttcatggtcccacagtatggatacctcaccctgaacaacgggagtcaggcggtaggacgcccttccttttactgcctggagtactttccttctcagatgctgcgtactggaaacaactttaccttcagctacacctttgaggacgttcctttccacagcagctacgctcacagccagagtttggaccggctgatgaatcctctgatcgaccagtatctatattatctgaacaggacacaatcaaatagtggaactcttcagcagtctaggctactgtttagccaagctggacccaccagcatgtctcttcaagctaaaaactggctgcctggaccttgctacagacagcagcgtctttcaaagcaggcaaacgacaacaacaacagcaactttccctggactgcggctacaaagtatcatctaaatggccgggactcgttggttaatccaggaccagctatggccagccacaaagacgatgaagaaaagtttttccccatgcatgggaccctgatatttggtaaacaaggaacaaatgctaacgacgcggatttggagcatgttatgattacagatgaagaagaaatcaggaccaccaatcctgtggctacagagcagtacggaaacgtgtcaaataatttgcaaaactcaaatactggtccaactacagaaaatgtcaatcaccagggagcgttacctggtatggtgtggcaggatcgagacgtgtacctgcagggacccatttgggccaagattcctcacaccgacggacactttcacccttctccactgatgggaggttttggactcaaacacccgcctcctcaaatcatgatcaaaaacactcccgttccagccaatcctcccacaaacttcagttctgccaagtttgcttctttcatcacacagtattccacgggccaggtcagcgtggagattgagtgggagctgcagaaggagaacagcaaacgctggaaccccgagatccagtatacttccaactacaacaaatctgttaatgtggactttactgtggacactaatggtgtgtattcagagcctcgccccattggcaccagatacctgactcgtaatctgtaa

SEQ ID NO: 210 - protein, 735 aa, Adeno-associated virus
MAADGYLPDWLEDTLSEGIRQWWKLKPGPPPPKPAERHQDDSRGLVLPGYKYLGPFNGLDKGEPVNEADAAALEHDKAYDRQLDSGDNPYLKYNHADAEFQERLKEDTSFGGNLGRAVFQAKKRVLEPLGLVEEPVKTAPGKKRPVEHSPVEPDSSSGTGKAGHQPARKRLNFGQTGDADSVPDPQPLGQPPAAPTSLGSTTMATGSGAPMADNNEGADGVGNSSGNWHCDSQWLGDRVITTSTRTWALPTYNNHLYKQISSQSGASNDNHYFGYSTPWGYFDFNRFHCHFSPRDWQRLINNNWGFRPKRLNFKLFNIQVKEVTQNDGTTTIANNLTSTVQVFTDSEYQLPYVLGSAHQGCLPPFPADVFMVPQYGYLTLNNGSQAVGRPSFYCLEYFPSQMLRTGNNFTFSYTFEDVPFHSSYAHSQSLDRLMNPLIDQYLYYLNRTQSNSGTLQQSRLLFSQAGPTSMSLQAKNWLPGPCYRQQRLSKQANDNNNSNFPWTAATKYHLNGRDSLVNPGPAMASHKDDEEKFFPMHGTLIFGKQGTNANDADLEHVMITDEEEIRTTNPVATEQYGNVSNNLQNSNTGPTTENVNHQGALPGMVWQDRDVYLQGPIWAKIPHTDGHFHPSPLMGGFGLKHPPPQIMIKNTPVPANPPTNFSSAKFASFITQYSTGQVSVEIEWELQKENSKRWNPEIQYTSNYNKSVNVDFTVDTNGVYSEPRPIGTRYLTRNL

SEQ ID NO: 211 - DNA, 2208 bp, Adeno-associated virus
atggctgccgatggttatcttccagattggctcgaggacactctctctgaaggaataagacagtggtggaagctcaaacctggcccaccaccaccaaagcccgcagagcggcataaggacgacagcaggggtcttgtgcttcctgggtacaagtacctcggacccttcaacggactcgacaagggagagccggtcaacgaggcagacgccgcggccctcgagcacgacaaggcctacgaccggcagctcgacagcggagacaacccgtacctcaagtacaaccacgccgacgcggagtttcaggagcgccttaaagaagatacgtcttttgggggcaacctcggacgagcagtcttccaggcaaaaaagagggttcttgaacctctgggcctggttgaggagcctgttaaaacggctccgggaaaaaagaggccggtagagcactctcctgcggagccagactcctcctcgggaaccggaaaagcgggccagcagcctgcaagaaaaagattgaatttcggtcagactggagacgcagactccgtacctgacccccagcctctcggacagccaccagcagccccctctggtctgggaactaatacgatggcttcaggcagtggcgcaccaatggcagacaataacgagggcgccgacggagtgggtaattcctcgggaaattggcattgcgattccacatggatgggcgacagagtcatcaccaccagcacccgaacttgggccctgcccacctacaacaaccatctctacaagcaaatctccagccaatcaggagccagcaacgacaaccactactttggctacagcaccccttgggggtattttgacttcaacagattccactgccacttttcaccacgtgactggcaaagactcatcaacaacaactggggattccggcccaagagactcaacttcaagctctttaacattcaagtcaaagaggtcacgcagaatgacggtacgacgacgattgccaataaccttaccagcacggttcaggtgtttactgactcggagtaccagctcccgtacgtcctcggctcggcgcatcaaggatgcctcccgccgttcccagcagacgtcttcatggtgccacagtatggatacctcaccctgaacaacgggagtcaggcagtaggacgctcttcattttactgcctggagtactttccttctcagatgctgcgtaccggaaacaactttaccttcagctacacctttgaggacgttcctttccacagcagctacgctcacagccagagtttggaccgtctcatgaatcctctcatcgaccagtacctgtattacttgagcagaacaaacactccaagcggaaccaccacgcagtccaggcttcagttttctcaggccggagcaagtgacattcgggaccagtctaggaactggcttcctggaccctgttaccgccagcagcgagtatcaaagacatctgcggataacaacaacagtgaatactcgtggactggagctaccaagtaccacctcaatggcagagactctctggtgaatccgggcccggccatggccagccacaaggacgatgaagaaaagttttttcctcagagcggggttctcatctttgggaagcaaggctcagagaaaacaaatgtggacattgaaaaggtcatgattacagacgaagaggaaatcaggaccaccaatcccgtggctacggagcagtatggttctgtatctaccaacctgcagggcggcaacacacaagcagctaccgcagatgtcaacacacaaggcgttcttccaggcatggtctggcaggacagagacgtgtacctgcaggggcccatctgggcaaagattccacacacggacggacattttcacccctctcccctcatgggcggattcggacttaaacaccctcctccacagattctcatcaagaacaccccggtacctgcgaatccttcgaccaccttcagtgcggcaaagtttgcttctttcatcacacagtattccacggggcaggtcagcgtggagatcgagtgggagctgcagaaggagaacagcaaacgctggaatcccgagatccagtacacttccaactacaacaaatctgttaatgtggactttactgttgacactaatggcgtgtattcagagcctcgccccattggcaccagatacctgactcgtaatctgtaa

SEQ ID NO: 212 - protein, 735 aa, Adeno-associated virus
MAADGYLPDWLEDTLSEGIRQWWKLKPGPPPPKPAERHKDDSRGLVLPGYKYLGPFNGLDKGEPVNEADAAALEHDKAYDRQLDSGDNPYLKYNHADAEFQERLKEDTSFGGNLGRAVFQAKKRVLEPLGLVEEPVKTAPGKKRPVEHSPAEPDSSSGTGKAGQQPARKRLNFGQTGDADSVPDPQPLGQPPAAPSGLGTNTMASGSGAPMADNNEGADGVGNSSGNWHCDSTWMGDRVITTSTRTWALPTYNNHLYKQISSQSGASNDNHYFGYSTPWGYFDFNRFHCHFSPRDWQRLINNNWGFRPKRLNFKLFNIQVKEVTQNDGTTTIANNLTSTVQVFTDSEYQLPYVLGSAHQGCLPPFPADVFMVPQYGYLTLNNGSQAVGRSSFYCLEYFPSQMLRTGNNFTFSYTFEDVPFHSSYAHSQSLDRLMNPLIDQYLYYLSRTNTPSGTTTQSRLQFSQAGASDIRDQSRNWLPGPCYRQQRVSKTSADNNNSEYSWTGATKYHLNGRDSLVNPGPAMASHKDDEEKFFPQSGVLIFGKQGSEKTNVDIEKVMITDEEEIRTTNPVATEQYGSVSTNLQGGNTQAATADVNTQGVLPGMVWQDRDVYLQGPIWAKIPHTDGHFHPSPLMGGFGLKHPPPQILIKNTPVPANPSTTFSAAKFASFITQYSTGQVSVEIEWELQKENSKRWNPEIQYTSNYNKSVNVDFTVDTNGVYSEPRPIGTRYLTRNL

SEQ ID NO: 213 - DNA, 3161 bp, Adeno-associated virus
gattgaatttagcggccgcgaattcgcccttgctgcgtcaactggaccaatgagaactttccattcaatgattgcgtcgacaagatggtgatctggtgggaggagggaaagatgaccgccaaggtcatggagtcggccaaagccattctcggaggaagcaaggtgcgcgtggaccagaaatgtaagtcctcggcccagatagacccgactcccgtgattgtcacctccaacaccaacatgtgcgccgtgattgacgggaactcaacgaccttcgagcaccagcagccgttgcaagaccggatgttcaaatttgaactcacccgccgtctggatcatgactttgggaaggtcaccaagcaggaagtcaaagactttttccggtgggcaaaggatcacgtggttgaggtggagcatgaattctacgtcaaaaagggtggagccaagaaaagacccgcccccagtgacgcagatataagtgagcccaaacgggcgcgcgggtcagttgcgcagccatcgacgtcagacgcggaagcttcgatcaactacgcggacaggtaccaaaacaaatgttctcgtcacgtgggcatgaatctgatgctgtttccctgcagacaatgcgagagaatgaatcaaaattcaaatatctgcttcactcacggacagaaggactgtttagagtgctttcccgtgtcagaatctcaacccgtttctgtcgtcaaaaaggcgtatcagaaactttgctacattcatcatatcatgggaaaggtgccagacgcttgcactgcctgcgatctggtcaatgtggatttggatgactgcatctctgaacaataaatgatttaaatcaggtatggctgccgatggttatcttccagattggctcaaggacactctctctgaaggaataagacagtggtggaagctcaaacctggcccaccaccaccaaagcccgcagagcggcataaggacgacagcgggggtcttgtgcttcctgggtacaagtacctcggacccttcaacggactcgacaagggagagccggtcaacgaggcagacgccgcggccctcgagtacgacaaggcctacgaccggcagctcgacagcggagacaacccgtacctcaagtacaaccacgccgacgcggagtttcaggagcgccttaaagaagatacgtcttttgggggcaacctcggacgagcagtcttccaggcgaaaaagagggttcttgaacctctgggcctggttgaggaacctgttaagacggctccgggaaaaaagaggccggtagagcactctcctgtggagccagactcctcctcgggaacaggaaaagcgggccagcagcctgcgagaaagagattgaattttggtcagactggagacgcagactccgtacctgacccccagcctctcggacagccaccagcagccccctctggtctgggaactaatacgatggctacaggcagtggcgcaccaatggcagacaataacgagggcgccgacggagtgggtaattcctcgggaagttggcattgcgattccacatggatgggcgacagagtcatcaccaccagcacccgaacctgggctctgcccacctacaacaaccatctgtacaagcagatctccagccaatcaggagccagcaacgacaaccactactttggctacagcaccccttgggggtattttgacttcaacagattccactgccacttttcaccacgtgactggcaaagactcatcaacaacaactggggattccggcccaagagactcaacttcaagctctttaacattcaagtcaaggaggtcacgcagaatgacggtacgacgacgattgccaataaccttaccagcacggttcaggtgtttactgactcggagtaccagctcccgtacgtccccggctcggcgcatcaaggatgcctcccgccgttcccagcagacgtcttcatggtgccacagtatggatacctcaccctgaacaacgggagtcaggcagtaggacgctcttcattttactgcctggagtactttccttctcagatgcttcgtaccggaaacaactttaccttcagctacacctttgaggatgttcctttccacagcagctacgctcacagccagagtttggaccgtctcatgaatcctctcatcgaccagtacctgtattacttgagcagaacaaacactccaagcggaaccaccacgcagtccaggcttcagttttctcaggccggagcaagtgacattcgggaccagtctaggaactggcttcctggaccctgttaccgccagcagcgagtatcaaagacagctgcggacaacaacaacagtgaatactcgtggactggagctaccaagtaccacctcaatggcagagactctctggtgaatccgggcccggccatggccagccacaaggacgatgaagaaaagttttttcctcaaagcggggttctcatctttgggaagcaaggctcagagaaaacaaatgtggacattgaaaaggtcatgattacagacgaagaggaaatcagaaccaccaatcccgtggccacggagcagtatggttctgtatctaccaacctccagagcggcaacacacaagcagctactgcagatgtcaacacacaaggcgttcttccaggcatggtctggcaggacagagacgtgcacctgcaggggcctatctgggcaaagattccacacacggacggacattttcacccctctcccctcatgggcggatttggacttaaacaccctcctccacagattctcatcaagaacaccccggtacctgcaaatccttcgaccaccttcagtgcggcaaagtttgcttccttcatcacacagtattccacagggcaggtcagcgtggagatcgagtgggagctgcagaaggagaacagcaaacgctggaaccccgagatccagtacacttccaactacaacaaatctgttaatgtggactttactgtggacactaatggtgtgtattcagagcctcgccccattggcaccagatacctgactcgtaatctgtaattgcttgttaatcaataaaccgtttaattcgtttcagttgaactttggtctctgcgaagggcgaattcgtttaaaccctgcaggactagtccctttagtgagg

SEQ ID NO: 214 - DNA, 3162 bp, Adeno-associated virus
gaattgaatttagcggccgcgaattcgcccttcgcagagaccaaagttcaactgaaacgaattaaacggtttattgattaacaagcaattacagattacgagtcaggtatctggtgccaatggggcgaggctctgaatacacgccattagtgtccacagtaaagtccacattaacagacttgttgtagttggaagtgtactgaatttcgggattccagcgtttgctgttttccttctgcagctcccactcgatctccacgctgacctgtcccgtggagtactgtgtgatgaaggaagcaaactttgccgcactgaaggtggtcgaaggattcgcaggtaccggggtgttcttgatgagaatctgtggaggagggtgtttaagtccgaatccacccatgaggggagaggggtgaaaatgtccgtccgtgtgtggaatctttgcccagatgggcccctgaaggtacacatctctgtcctgccagaccatgcctggaagaacgccttgtgtgttgacatctgcggtagctgcttgtctgttgcctctctggaggttggtagatacagaaccgtactgctccgtagccacgggattggttgtcctgatttcctcttcgtctgtaatcatgaccttttcaatgtccacatttgttttctctgagccttgcttcccaaagatgagaaccccgctctgaggaaaaaacttttcttcattgtccttgtggcttgccatggccgggcccggattcaccagagagtctctgccattgaggtggtacttggtagctccagtccacgagtattcactgttgttgttatccgcagatgtctttgatactcgctgctggcggtaacagggtccaggaagccagttcctagactggtcccgaatgtcactcgctccggcctgagaaaactgaagccttgactgcgtggtggttccacttggagtgtttgttgtgctcaagtaatacaggtactggtcgatgagaggattcatgagacggtccagactctggctgtgagcgtagccgctgtggaaaggaacgtcctcaaaagtgtagctgaaggtaaagttgtttccggtacgcagcatctgagaaggaaagtactccaggcagtaaaatgaagagcgtcctactgcctgactcccgttgttcagggtgaggtatccatactgtggcaccatgaagacgtctgctgggaacggcgggaggcatccttgatgcgccgagccgaggacgtacgggagctggtactccgagtcagtaaacacctgaaccgtgctggtaaggttattggcaatcgtcgtcgtaccgtcattctgcgtgacctctttgacttgaatgttaaagagcttgaagttgagtctcttgggtcggaatccccagttgttgttgatgagtctttgccagtcacgtggtgaaaagtggcagtggaatctgttgaagtcaaaatacccccaaggggtgctgtagccaaagtagtgattgtcgttcgaggctcctgattggctggaaatttgtttgtagaggtggttgttgtaggtgggcagggcccaggttcgggtgctggtggtgatgactctgtcgcccatccatgtggaatcgcaatgccaatttcccgaggaattacccactccgtcggcgccctcgttattgtctgccattggtgcgccactgcctgtagccatcgtattagttcccagaccagagggggctgctggtggctgtccgagaggctgggggtcaggtactgagtctgcgtctccagtctgaccaaaattcaatctttttcttgcaggctgctggcccgcctttccggttcccgaggaggagtctggctccacaggagagtgctctaccggcctcttttttcctggagccgtcttgacaggttccccaaccaggcccagaggttcaagaaccctctttttcgcctggaagactgctcgtccgaggttgcccccaaaagacgtatcttctttaaggcgctcctgaaactccgcgtcggcgtggttgtacttgaggtacgggttgtctccgctgtcgagctgccggtcgtaggctttgtcgtgctcgagggccgcggcgtctgcctcgttgaccggctctcccttgtcgagtccgttgaagggtccgaggtacttgtacccaggaagcacaagacccctgctgtcgtccttatgccgctctgcgggctttggtggtggtgggccaggtttgagcttccaccactgtcttattccttcagagagagtgtcctcgagccaatctggaagataaccatcggcagccatacctgatttaaatcatttattgttcaaagatgcagtcatccaaatccacattgaccagatcgcaggcagtgcaagcgtctggcacctttcccatgatatgatgaatgtagcacagtttctgatacgcctttttgacgacagaaacgggttgagattctgacacgggaaagcactctaaacagtctttctgtccgtgagtgaagcagatatttgaattctgattcattctctcgcattgtctgcagggaaacagcatcagattcatgcccacgtgacgagaacatttgttttggtacctgtctgcgtagttgatcgaagcttccgcgtctgacgtcgatggctgcgcaactgactcgcgcacccgtttgggctcacttatatctgcgtcactgggggcgggtcttttcttggctccaccctttttgacgtagaattcatgctccacctcaaccacgtgatcctttgcccaccggaaaaagtctttgacttcctgcttggtgaccttcccaaagtcatgatccagacggcgggtgagttcaaatttgaacatccggtcttgcaacggctgctggtgttcgaaggtcgttgagttcccgtcaatcacggcgcacatgttggtgttggaggtgacgatcacgggagtcgggtctatctgggccgaggacttgcatttctggtccacgcgcaccttgcttcctccgagaatggctttggccgactccacgaccttggcggtcatcttcccctcctcccaccagatcaccatcttgtcgacacagtcgttgaagggaaagttctcattggtccagttgacgcagcaagggcgaattcgtttaaacctgcaggactagtccctttagtgaggg

SEQ ID NO: 215 - DNA, 3164 bp, Adeno-associated virus
gcgaattgaatttagcggccgcgaattcgcccttcgcagagaccaaagttcaactgaaacgaattaaacggtttattgattaacaagcaattacaaattacgagtcaggtatctggtgccaatggggcgaggctctgaatacacgccattagtgtccacagtaaagtccacattaacagacttgttgtagttggaagtgtactgaatttcgggattccagcgtttgctgttttccttctgcagctcccactcgatctccacgctgacctgtcccgtggagtactgtgtgatgaaggaagcaaactttgccgcactgaaggtggtcgaaggattcgcaggtaccggggtgttcttgatgagaatctgtggaggagggtgtttaggtccgaatccacccatgaggggagaggggtgaaaatgtccgtccgtgtgtggaatctttgcccagatgggcccctgaaggtacacatctctgtcctgccagaccatgcctggaagaacgccttgtgtgttgacatctgcggtagctgcttgtctgttgcctctctggaggttggtagatacagaaccatactgctccgtagccacgggattggttgtcctgatttcctcttcgtctgtaatcatgaccttttcaatgtccacatttgttttctctgagccttgcttcccaaagatgagaaccccgctctgaggaaaaaacttttcttcattgtccttgtggcttgccatggccgggcccggattcaccagagagtctctgccattgaggtggtacttggtagctccagtccacgagtattcactgttgttgttatccgcagatgtctttgatactcgctgctggcggtaacagggtccaggaagccagttcctagactggtcccgaatgtcactcgctccggcctgagaaaactgaagccttgactgcgtggtggttccacttggagtgtttgttgtgctcaagtaatacaggtactggtcgatgagaggattcatgagacggtccagactctggctgtgagcgtagctgctgtggaaaggaacgtcctcaaaagtgtagctgaaggtaaagttgtttccggtacgcagcatctgagaaggaaagtactccgggcagtaaaatgaagagcgtcctactgcctgactcccgttgctcagggtgaggtatccatactgtggcaccatgaagacgtctgctgggaacggcgggaggcatccttgatgcgccgagccgaggacgtacgggagctggtactccgagtcagtaaacacctgaaccgtgctggtaaggttattggcaatcgtcgtcgtaccgtcattctgcgtgacctctttgacttgaatgttaaagagcttgaagttgagtctcttgggtcggaatccccagttgttgttgatgagtctttgccagtcacgtggtgaaaagtggcagtggaatctgttgaagtcaaaatacccccaaggggtgctgtagccaaagtagtgattgtcgttcgaggctcctgattggctggaaatttgtctgtagaggtggttgttgtaggtgggcagggcccaggttcgggtgctggtggtgatgactctgtcgcccatccatgtggaatcgcaatgccgatttcccgaggaattacccactccgtcggcgccctcgttattgtctgccattggtgcgccactgcctgtagccatcgtattagttcccagaccagagggggctgctggtggctgtccgagaggctgggggtcaggtactgagtctgcgtctccagtctgaccaaaattcaatctttttcttgcaggctgctggcccgcctttccggttcccgaggaggagtctggctccacaggagagtgctctaccggcctcttttttcccggagccgtcttaacaggttccccaaccaggcccagaggttcaagaaccctctttttcgcctggaagactgctcgtccgaggttgcccccaaaagacgtatcttctttaaggcgctcctgaaactccgcgtcggcgtggttgtacttgaggtacgggttgtctccgctgtcgagctgccggtcgtaggctttgtcgtgctcgagggccgcggcgtctgcctcgttgaccggctctcccttgtcgagtccgttgaagggtccgaggtacttgtacccaggaagcacaagacccctgctgtcgtccttatgccgctctgcgggctttggtggtggtgggccaggtttgagcttccaccactgtcttattccttcagagagagtgtcctcgagccaatctggaagataaccatcggcagccatacctgatttaaatcatttattgttcaaagatgcagtcatccaaatccacattgaccagatcgcaggcagtgcaagcgtctggcacctttcccatgatatgatgaatgtagcacagtttctgatacgcctttttgacgacagaaacgggttgagattctgacacgggaaagcactctaaacagtctttctgtccgtgagtgaagcagatatttgaattctgattcattctctcgcattgtctgcagggaaacagcatcagattcatgcccacgtgacgagaacatttgttttggtacctgtctgcgtagttgatcgaagcttccgcgtctgacgtcgatggctgcgcaactgactcgcgcacccgtttgggcccacttatatctgcgtcactgggggcgggtcttttcttggctccaccctttttgacgtagaattcatgctccacctcaaccacgtgatcctttgcccaccggaaaaagtctttgacttcctgcttggtgaccttcccaaagtcatgatccagacggcgggtgagttcaaatttgaacatccggtcttgcaacggctgctggtgttcgaaggtcgttgagttcccgtcaatcacggcgcacatgttggtgttggaggtgacgatcacgggagtcgggtctatctgggccgaggacttgcatttctggtccacgcgcaccttgcttcctccgagaatggctttggccgactccacgaccttggcggtcatcttcccctcctcccaccagatcaccatcttgtcgacacagtcgttgaagggaaagttctcattggtccagttgacgcagcaagggcgaattcgtttaaacctgcaggactagtccctttagtgaggg

SEQ ID NO: 216 - DNA, 3163 bp, Adeno-associated virus
accctcactaaagggactagtcctgcaggtttaaacgaattcgcccttgctgcgtcaactggagcaatgagaactttcccttcaacgactgtgtcgacaagatggtgatttggtgggaggaggggaagatgaccgccaaggtcgtggagtcggccaaagccattctcggaggaagcaaggtgcgcgtggaccagaaatgcaagtcctcggcccagatagatccgactcccgtgatcgtcacctccaacaccaacatgtgcgccgtgattgacgggaactcaacgaccttcgaacaccagcagccgttgcaagaccggatgttcaaatttgaactcacccgccgtctggatcatgactttgggaaggtcaccaagcaggaagtcaaagactttttccggtgggcaaaggatcacgtggttgaggtggagcatggattctacgtcaaaaagggtggagccaagaaaagacccgcccctagtgacgcagatataagtgagcccaaacgggtgcgcgagtcagttgcgcagccatcgacgtcggacgcggaagcttcgatcaactacgcggacaggtaccaaaacaaatgttctcgtcacgtgggcatgaatctgatgctgtttccctgcagacaatgcgagagaatgaatcaaaattcaaatatctgcttcactcacggacagaaagactgtttagagtgctttcccgtgtcagaatctcaacctgtttctgtcgtcaaaaaggcgtatcagaaactgcgctacattcatcatatcatgggaaaggtgccagacgcttgcactgcctgcgatctggtcaatgtggatttggatgactgcatctctgaacaataaatgatttaaatcaggtatggctgccgatggttatcttccagattggctcgaggacactctctctgaaggaataagacagtggtggaagctcaaacctggcccaccaccaccaaagcccgcagagcggcataaggacgacagcaggggtcttgtgcttcctgggtacaagtacctcggacccttcaacggactcgacaagggagagccggtcaacgaggcagacgccgcggccctcgagcacgacaaggcctacgaccggcagctcgacagcggagacaacccgtacctcaagtacaaccacgccgacgcggagtttcaggagcgtcttaaagaagatacgtcttttgggggcaacctcggacgagcagtcttccaggcgaaaaagagggttcttgaacctctgggcctggttgaggaacctgttaagacggctccgggaaaaaagaggccggtagagcactctcctgcggagccagactcctcctcgggaaccggaaaagcgggccagcagcctgcaagaaaaagactgaatttcggtcagactggagacgcagactccgtacctgacccccagcctctcggacagccaccagcagcccccacaagtttgggatctactacaatggctacaggcagtggcgcaccaatggcagacaataacgagggtgccgatggagtgggtaattcctcaggaaattggcattgcgattcccaatggctgggcgacagagtcatcaccaccagcacccgaacctgggccctgcccacctacaacaaccacctttacaagcaaatctccagccaatcaggagcctcaaacgacaaccactactttggctacagcaccccctgggggtattttgacttcaacagattccactgccacttttcaccacgtgactggcaaagactcatcaacaacaactggggattccgacccaagagactcaacttcaagctctttaacattcaagtcaaagaggtcacgcagaatgacggtacgacgacgattgccaataaccttaccagcacggttcaggtgtttactgactcggagtaccagctcccgtacgtcctcggctcggcgcatcaaggatgcctcccgccgtttccagcggacgtcttcatggtcccacagtatggatacctcaccctgaacaacgggagtcaggcggtaggacgctcttccttttactgcctggagtgctttccttctcagatgctgcgtactggaaacaactttcagttcagctacacttttgaagacgtgcctttccacagcagctacgctcacagccagagtttggatcggctgatgaatcctctgatcgaccagtacctgtattatctaaacagaacacaaacagctagtggaactcagcagtctcggctactgtttagccaagctggacccacaagcatgtctcttcaagctaaaaactggctgcctggaccgtgttatcgccagcagcgtttgtcaaagcaggcaaacgacaacaacaacagcaactttccctggactggagctaccaagtaccacctcaatggcagagactctttggtgaacccgggcccggccatggccagccacaaggacgatgaagaaaagtttttccccatgcatggaaccctaatatttggtaaagaaggaacaaatgctaccaacgcggaattggaaaatgtcatgattacagatgaagaggaaatcaggaccaccaatcccgtggctacagagcagtacggatatgtgtcaaataatttgcaaaactcaaatactgctgcaagtactgaaactgtgaatcaccaaggagcattacctggtatggtgtggcaggatcgagacgtgtacctgcagggacccatttgggccaagattcctcacaccgatggacactttcatccttctccactgatgggaggttttggactcaaacacccgcctcctcagattatgatcaaaaacactcccgttccagccaatcctcccacaaacttcagttctgccaagtttgcttccttcatcacacagtattccacgggacaggtcagcgtggagatcgagtgggagctgcagaaggagaacagcaaacgctggaatcccgaaattcagtacacttccaactacaacaaatctgttaatgtggactttactgtggacactaatggtgtgtattcagagcctcgccccattggcaccagatacctgactcgtaatctgtaattgcttgttaatcaataaaccgtttaattcgtttcagttgaactttggtctctgcgaagggcgaattcgcggccgctaaattcaattcgcc

SEQ ID NO: 217 - protein, 735 aa, Adeno-associated virus
MAADGYLPDWLEDTLSEGIRQWWKLKPGPPPPKPAERHKDDSRGLVLPGYKYLGPFNGLYKGEPVDEADAAALEHDKAYDRQLDSGDNPYLKYNHADAEFQERLKEDTSFGGNLGRAVFQAKKRVLEPLGLVGEPVKTAPGKKRPVEHSPVEPDSSSGTGKAGNQPARKRLNFGQTGDADSVPDPQPLGQPPAAPSGLGSTTMATGSGAPVADNNEGADGVGNSSGNWHCDSQWLGDRVITTSTRTWALPTYNNHLYKQISSQSGASNDNHYFGYSTPWGYFDFNRFHCHFSPRDRQRLINNNWGFRPKRLNFKLFNIQVKEVTQNDGTTTIANNLTSTVQVFTDSGYQLPYVLGLAHQGCLPPFPADVFMVPQYGYLTLNNGSQAVGRSSFYCLEYFPSQMLRTGNNFQFSYTFEDVPFHSSYAHSQSLDRLMNPLIDQYLYYLNKTQSNSGTLQQSRLLFSQAGPTSMSLQAKNWLPGPCYRQQRLSKQANDNNNSNFPWTAATKYHLNGRDSLVNPGPAMASHKDDEEKFFPMHGTLIFGKQGTNANDADLDNVMITDEEEIRTTNPVATEQYGYVSNNLQNSNTGPTTGTVNHQGALPGMVWQDRDVYLQGPIWAKIPHTDGHFHPSPLMGGFGLKHPPPQIMIKNTPVPANPPTNFSSAKFASFITQYSTGQVSVEIEWELQKEDSKRWNPEIQYTSNYNKPVNVDFTVDTNGVYSEPRPIGTRYLTRNL

SEQ ID NO: 218 - DNA, 2208 bp, Adeno-associated virus
atggctgccgatggttatcttccagattggctcgaggacactctctctgaaggaataagacagtggtggaagctcaaacctggcccaccaccaccaaagcccgcagagcggcataaggacgacagcaggggtcttgtgcttcctgggtacaagtacctcggacccttcaacggactctacaagggagagccggtcgacgaggcagacgccgcggccctcgagcacgacaaggcctacgaccggcagctcgacagcggagacaacccgtacctcaagtacaaccacgccgacgcggagtttcaggagcgccttaaagaagatacgtcttttgggggcaacctcggacgagcagtcttccaggccaaaaagagggttcttgaacctctgggcttggttggggagcctgttaaaacggctccgggaaaaaagaggccggtagagcactctcctgtggagccagactcctcctcgggaaccggaaaagcgggcaaccagcctgcaagaaaaagattgaattttggtcagactggagacgcagactccgtacctgacccccagcctctcggacagccaccagcagccccctctggtctgggatctactacaatggctacaggcagtggcgcaccagtggcagacaataacgagggtgccgatggagtgggtaattcctcaggaaattggcattgcgattcccaatggctgggcgacagagtcatcaccaccagcacccgaacctgggctctgcccacctacaataaccacctctacaagcaaatctccagccaatcaggagcctcaaacgacaaccactactttggctacagcaccccctgggggtattttgacttcaacagattccactgccacttttcaccacgtgaccggcaaagactcatcaacaacaactggggattccgaccaaaaagactcaacttcaagctctttaacattcaagtcaaagaggtcacgcagaatgacggtacgacgacgattgccaataaccttaccagcacggttcaggtgtttactgactcggggtaccagctcccgtacgtcctcggcttggcgcatcaaggatgcctcccgccgttcccagcagacgtcttcatggtgccacagtatggatacctcaccctgaacaacgggagtcaggcggtaggacgctcttccttttactgcctggagtactttccttctcagatgctgcgtactggaaacaactttcagttcagctacacctttgaagacgttcctttccacagcagctacgctcacagccagagtctggatcggctgatgaatcctctgatcgaccagtacctgtattatctgaacaagacacaatcaaatagtggaactcttcagcagtctcggctactgtttagccaagctggacccaccagcatgtctcttcaagctaaaaactggctgcctggaccttgctacagacagcagcgtctgtcaaagcaggcaaacgacaacaacaacagcaactttccctggactgcggctacaaagtatcatctaaatggccgggactcgttggttaatccaggaccagctatggccagccacaaagacgatgaagaaaagtttttccccatgcatggaaccctgatatttggtaaacaaggaacaaatgctaacgacgcggatttggacaatgtcatgattacagatgaagaagaaatccgcaccaccaatcccgtggctacggagcagtacggatatgtgtcaaataatttgcaaaactcaaatactggtccaactactggaactgtcaatcaccaaggagcgttacctggtatggtgtggcaggatcgagacgtgtacctgcagggacccatttgggccaagattcctcacaccgatggacactttcatccttctccacttatgggaggttttggactcaaacacccacctcctcagatcatgattaaaaacactcccgttccagccaatcctcccacaaacttcagttctgccaagtttgcttctttcatcacacagtattccacgggacaagtcagcgtggagatcgagtgggagctgcagaaggaggacagcaaacgctggaaccccgagatccagtacacttccaactataacaaacctgttaatgtggactttactgtggacactaatggtgtgtattcagagcctcgccccattggcaccagatacctgactcgtaatctgtaa

SEQ ID NO: 219 - DNA, 3161 bp, Adeno-associated virus
cgaattgatttagcggccgcgaattcgcccttcgcagagaccaaagttcaactgaaacgaattaaacggtttattgattaacaagcaattacagattacgagtcaggtatctggtgccaatggggcgaggctctgaatacacaccattagtgtccacagtaaagtccacattaacagatttgttgtagttggaagtgtactggatctcgggattccagcgtttgctgttctccttctgtagctcccactcgatctccacgctgacccgccccgtggaatactgtgtgatgaaggaagcaaactttgccgcactgaaggtggtcgaaggattcgcaggtaccggggtgtttttgatgagaatctgtggaggagggtgtttaagtccgaatccgcccatgaggggagaggggtgaaaatgtccgtccgtgtgcggaatctttgcccagataggcccctgcaggtacacgtctctgtcctgccagaccatgcctggaagaacgccttgtgtgttgacatctgcagtagatgcttgtgtgttgccgctctggaggttggtagatacagaaccatactgctccgtggccacgggattggtggttctgatttcctcttcgtctgtaatcatgaccttttcaatgtccacatttgttttctctgatccttgttttccaaagatgagaaccccgctctgaggaaaaaacttttcttcatcgtccttgtggctggccattgccgggcccggattcaccagagagtctctgccattgaggtggtacttggtagctccaatccacgagtattcactgttgttgttgtccgcagatgtctttgatactcgctgctggcggtaacagggtccaggaagccagttcctagactgatcccgaatgtcactcgctccggcctgagaaaactgaagcctggactgcgtggtggttccgcttggagtgtttgttctgctcaagtaatacaggtactggtcgatgagaggattcatgagacggtccaaactctggctgtgagcgtagctgctgtggaaaggaacatcctcaaaggtgtagctgaaggtaaagttgtttccggtacgcagcatctgagaagggaagtactccaggcagtaaaatgaagagcgtcctactgcctgactcccgttgttcagggtgaggtatccatactgtggcaccatgaagacgtctgctgggaacggcgggaggcatccttgatgcgccgagccgaggacgtacgggagctggtactccgagtcagtaaacacctgaaccgtgctggtaaggttattggcaatcgtcgtcgtaccatcattctgcgtgacctctctgacttgaatgttaaagagcttgaagttgagtctcttgggccggaatccccagttgttgttgatgagtctttgccagtcacgtggtgaaaagtggcagtggaatctgttgaagtcaaaatacccccaaggggtgctgtagccaaagtagtggttgtcgttgctggctcctgattggctggaaatctgcttgtacagatggttgttgtaggtgggcagagcccaggttcgggtgctggtggtgatgactctgtcgcccatccatgtggaatcgcaatgccaatttcccgaggaattacccactccgtcggcgccatcgttattgtctgccattggtgcgccactgcctgtagccatcgtattagttcccagaccagagggggctgctggtggctgtccgagaggctgggggtcaggtacggagtctgcgtctccagtctgaccgaaattcaatctctttcttgcaggctggttgcccgcttttccggttcccgaggaggagtctggctccacaggagagtgctctaccggcctcttttttcccggagccgtcttaacaggctcctcaaccaggcccagaggttcaagaaccctcttttttgcctggaagactgctcgtccgaggttgcccccaaaagacgtatcttctttaaggcgctcctgaaactccgcgtcggcgtggtcgtacttgaggtacgggttgtctccgctgtcgagctgccggtcgtaggccttgtcgtgctcgagggccgcggcgtctgcctcgttgaccggctctcccttgtcgagtccgttgaagggtccgaggtacttgtacccaggaagcacaagacccctgctgtcgtccttatgccgctctgcgggctttggtggtggtgggccaggtttgagcttccaccactgtcttattccttcagagagagtgtcctcgagccaatctggaagataaccatcggcagccatacctgatttaaatcatttattgttcagagatgcagtcatccaaatccacattgaccagatcgcaggcagtgcaagcgtctggcacctttcccatgatatgatgaatgtagcaaagtttctgatacgcctttttgacgacagaaacgggttgagattctgacacgggaaagcactctaaacagtctttctgtccgtgagtgaagcagatatttgaattctgattcattctctcgcattgtctgcagggaaacagcatcagattcatgcccacgtgacgagaacatttgttttggtacctgtccgcgtagttgatcgaagcttccgcgtctgacgtcgatggctgcgcaactgactcgcgcgcccgtttgggctcacttatatctgcgtcactgggggcgggtcttttcttggctccaccctttttgacgtagaattcatgctccacctcaaccacgtgatcctttgcccaccggaaaaagtctttcacttcctgcttggtgaccttcccaaagtcatgatccagacggcgggttagttcaaatttgaacatccggtcttgcaacggctgctggtgttcgaaggtcgttgagttcccgtcaatcacggcgcacatgttggtgttggaggtggcgatcacgggagtcgggtctatctgggccgaggacttgcacttttggtccacgcgcaccttgcttcctccgagaatggcttcggccgattccacgaccttggcggtcatctttccctcctcccaccagatcaccatcttgtcgacacagtcgttgaagggaaagttctcattggtccagttgacgcagcaagggcgaattcgtttaaacctgcaggaactagtcccttagtgagg

SEQ ID NO: 220 - protein, 735 aa, Adeno-associated virus
MAADGYLPDWLEDTLSEGIRQWWKLKPGPPPPKPAERHKDDSRGLVLPGYKYLGPFNGLYKGEPVNEADAAALEHDKAYDRQLDSGDNPYLKYNHAGAEFQERLKEDTSFGGNLGRAVFQAKKRVLEPLGLVEEPVKTAPGKKRPVEHSPVEPDSSSGTGKAGNQPARKRLNFGQTGDADSVPDPQPLGQPPAAPSGLGSTTMATGSGAPVADNNEGADGVGNSSGNWHCDSQWLGDRVITTSTRTWALPTYNNHLYKQISSQSGASNDNHYFGYSTPWGYFDFNRFHCHFSPRDWQRLINNNWGFRPKRLNFKLFNIQVKEVTQNDGTTTIANNLTSTVQVFTDSEYQLPYVLGSAHQGCLPPFPADVFMVPQYGYLTLNNGSQAVGRSSFYCLEYFPSQMLRTGNNFQFSYTFEDVPFHSSYAHSQSLDRLMNPLIDQYLYYLNKTQSNSGTLQQSRLLFSQAGPTSMSLQAKNWLPGPCYRQQRLSKQANDNNNSNFPWTAATKYHLNGRDSLVNPGPAMASHKDDEEKFFPMHGTLIFGKQGTNANDADLDNVMITDEEEIRTTNPVATEQYGYVSNNLQDSNTGPTTGTVNHQGALPGMVWQDRDVYLQGPIWAKIPHTDGHFHPSPLMGGFGLKHPPPQIMIKNTPVPANPPTNFSSAKFASFITQYSTGQVSVEIEWELQKENSKRWNPEIQYTSNYNKSVNVDFTVDTNGVYSEPRPIGTRYLTRNL

SEQ ID NO: 221 - DNA, 2208 bp, Adeno-associated virus
atggctgccgatggttatcttccagattggctcgaggacactctctctgaaggaataagacagtggtggaagctcaaacctggcccaccaccgccaaagcccgcagagcggcataaggacgacagcaggggtcttgtgcttcctgggtacaagtacctcggacccttcaacggactctacaagggagagccggtcaacgaggcagacgccgcggccctcgagcacgacaaggcctacgaccggcagctcgacagcggagacaacccgtacctcaagtacaaccacgccggcgcggagtttcaggagcgccttaaagaagatacgtcttttgggggcaacctcggacgagcagtcttccaggccaaaaagagggttcttgaacctctgggcttggttgaggagcctgttaaaacggctccgggaaaaaagaggccggtagagcactctcctgtggagccagactcctcctcgggaaccggaaaagcgggcaaccagcctgcaagaaaaagattgaattttggtcagactggagacgcagactccgtacctgacccccagcctctcggacagccaccagcagccccctctggtctgggatctactacaatggctacaggcagtggcgcaccagtggcagacaataacgagggtgccgatggagtgggtaattcctcaggaaattggcattgcgattcccaatggctgggcgacagagtcatcaccaccagcacccgaacctgggctctgcccacctacaacaaccacctctacaagcaaatctccagccaatcaggagcctcaaacgacaaccactactttggctacagcaccccctgggggtattttgacttcaacagattccactgccacttttcaccacgtgactggcaaagactcatcaacaacaactggggattccgaccaaagagactcaacttcaagctctttaacattcaagtcaaagaggtcacgcagaatgacggtacgacgacgattgccaataaccttaccagcacggttcaggtgtttactgactcggagtaccagctcccgtacgtcctcggctcggcgcatcaaggatgcctcccgccgttcccagcagacgtcttcatggtgccacagtatggatacctcaccctgaacaacgggagtcaggcggtaggacgctcttccttttactgcctggagtactttccttctcagatgctgcgtactggaaacaactttcagttcagctacacctttgaagacgttcctttccacagcagctacgctcacagccagagtctggatcggctgatgaatcctctgatcgaccagtacctgtattatctgaacaagacacaatcaaatagtggaacccttcagcagtctcggctactgtttagccaagctggacccaccagcatgtctcttcaagctaaaaactggctgcctggaccttgctacagacagcagcgtctgtcaaagcaggcaaacgacaacaacaacagcaactttccctggactgcggctacaaagtatcatctaaatggccgggactcgttggttaatccaggaccagctatggccagccacaaagacgatgaagaaaagtttttccccatgcatggaaccctgatatttggtaaacaaggaacaaatgctaacgacgcggatttggacaatgtcatgattacagatgaagaagaaatccgcaccaccaatcccgtggctacggagcagtacggatatgtgtcaaataatttgcaagactcaaatactggtccaactactggaactgtcaatcaccaaggagcgttacctggtatggtgtggcaggatcgagacgtgtacctgcagggacccatttgggccaagattcctcacaccgatggacactttcatccttctccacttatgggaggttttggactcaaacacccacctcctcagatcatgattaaaaacactcccgttccagccaatcctcccacaaacttcagttctgccaagtttgcttctttcatcacacagtattccacgggacaagtcagcgtagagatcgagtgggagctgcagaaggagaacagcaaacgctggaaccccgagatccagtacacttccaactataacaaatctgttaatgtggactttactgtggacactaatggtgtgtattcagagcctcgccccattggcaccagatacctgactcgtaatctgtaa

SEQ ID NO: 222 - protein, 738 aa, Adeno-associated virus
MAADGYLPDWLEDNLSEGIREWWDLKPGAPKPKANQQKQDDGRGLVLPGCKYLGPFNGLDKGEPVNAADAAALEHDKAYDQQLKAGDNPYLRYNHADAEFQERLQEDTSFGGNLGRAVFQAKKRVLEPLGLVEEGAKTAPGKKRPVEPSPQRSPDSSTGIGKTGQQPAKKRLNFGQTGDSESVPDPQPIGEPPAGPSGLGSGTMAAGGGAPMADNNEGADGVGSSSGNWHCDSTWLGDRVITTSTRTWALPTYNNHLYKQISNGTSGGSTNDNTYFGYSTPWGYFDFNRFHCHFSPRDWQRLINNNWGFRPKRLNFKLFNIQVKEVTQNEGTKTIANNLTSTIQVFTDSEYQLPYVLGSAHQGCPPPFPADVFMIPQYGYLTLNNGSQAVGRSSFYCLEYFPSQMRRTGNNFEFSYQFEDVPFHSSYAHSQSLDRLMNPLIDQYLYYLSRTQSTGGTAGTQQLLFSQAGPNNMSAQAKNWLPGPCYRQQRVSTTLSQNNNSNFAWTGATKYHLNGRDSLVNPGVAMATHKDDEERFFPSSGVLMFGKQGAGKDNVDYSSVMLTSEEEIKTTNPVATEQYGVVADNLQQQNAAPIVGAVNSQGALPGMVWQNRDVYLQGPIWAKIPHTDGNFHPSPLMGGFGLKHPPPQILIKNTPVPADPPTTFSQAKLASFITQYSTGQVSVEIEWELQKENSKRWNPEIQYTSNYNKSVNVDFTVDTNGVYSEPRPIGTRYLTRNL

SEQ ID NO: 223 - DNA, 2217 bp, Adeno-associated virus
atggctgccgatggttatcttccagattggctcgaggacaacctctctgagggcattcgcgagtggtgggacttgaaacctggagccccgaaacccaaagccaaccagcaaaagcaggacgacggccggggtctggtgcttcctggctgcaagtacctcggacccttcaacggactcgacaagggggagcccgtcaacgcggcggacgcagcggccctcgagcacgacaaggcctacgaccagcagctcaaagcgggtgacaatccgtacctgcggtataaccacgccgacgccgagtttcaggagcgtctgcaagaagatacgtcttttgggggcaacctcgggcgagcagtcttccaggccaagaagcgggttctcgaacctctcggtctggttgaggaaggcgctaagacggctcctggaaagaagagaccggtagagccatcaccccagcgttctccagactcctctacgggcatcggcaagacaggccagcagcccgcgaaaaagagactcaactttgggcagactggcgactcagagtcagtgcccgaccctcaaccaatcggagaaccccccgcaggcccctctggtctgggatctggtacaatggctgcaggcggtggcgctccaatggcagacaataacgaaggcgccgacggagtgggtagttcctcaggaaattggcattgcgattccacatggctgggcgacagagtcatcaccaccagcacccgaacctgggccctccccacctacaacaaccacctctacaagcaaatctccaacgggacatcgggaggaagcaccaacgacaacacctacttcggctacagcaccccctgggggtattttgactttaacagattccactgccacttctcaccacgtgactggcagcgactcatcaacaacaactggggattccggcccaagagactcaacttcaagctcttcaacatccaggtcaaggaggtcacgcagaatgaaggcaccaagaccatcgccaataaccttaccagcacgattcaggtctttacggactcggaataccagctcccgtacgtcctcggctctgcgcaccagggctgcccgcctccgttcccggcggacgtcttcatgattcctcagtacgggtacctgactctgaacaacggcagtcaggccgtgggccgttcctccttctactgcctggagtactttccttctcaaatgcggagaacgggcaacaactttgagttcagctaccagtttgaggacgtgccttttcacagcagctacgcgcatagccaaagcctggaccggctgatgaaccccctcatcgaccagtacctgtactacctgtctcggactcagtccacgggaggtaccgcaggaactcagcagttgctattttctcaggccgggcctaataacatgtcggctcaggccaaaaactggctacccgggccctgctaccggcagcaacgcgtctccacgacactgtcgcaaaataacaacagcaactttgcttggaccggtgccaccaagtatcatctgaatggcagagactctctggtaaatcccggtgtcgctatggcaacgcacaaggacgacgaagagcgattttttccatccagcggagtcttgatgtttgggaaacagggagctggaaaagacaacgtggactatagcagcgttatgctaaccagtgaggaagaaatcaaaaccaccaacccagtggccacagaacagtacggcgtggtggccgataacctgcaacagcaaaacgccgctcctattgtaggggccgtcaacagtcaaggagccttacctggcatggtctggcagaaccgggacgtgtacctgcagggtcctatctgggccaagattcctcacacggacggcaactttcatccttcgccgctgatgggaggctttggactgaaacacccgcctcctcagatcctgattaagaatacacctgttcccgcggatcctccaactaccttcagtcaagccaagctggcgtcgttcatcacgcagtacagcaccggacaggtcagcgtggaaattgaatgggagctgcagaaagagaacagcaagcgctggaacccagagattcagtatacttccaactataacaaatctgttaatgtggactttactgtggacactaatggtgtgtattcagagcctcgccccattggcaccagatacctgactcgtaatctgtaa

SEQ ID NO: 224 - DNA, 3167 bp, Adeno-associated virus
attgaatttagcggccgcgaattcgcccttcgcagagaccaaagttcaactgaaacgaattaaacggtttattgattaacaagcaattacagattacgagtcaggtacctggtgccaatggggcgaggctctgaatacacaccattagtgtccacagtaaagtccacattaacagatttgttgtagttggaagtgtactgaatctcgggattccagcgtttgctgttctccttctgcagctcccactcgatctccacgctgacctgccccgtggagtactgtgtaatgaaggaagcaaactttgccgcactgaaggtagtcgaaggattcgcaggtaccggggtgttcttgatgagaatctgcgggggagggtgtttaagtccgaatccgcccatgaggggagaggggtgaaaatgtccgtccgtgtgtggaatctttgcccagatgggcccctgcaggtacacgtctctgtcctgccacaccatgcctggaagaacgccttgtgtgttgacatctgaggtagctgcttgtgtgttgccgctctggaggttggtagatacagaaccatactgctccgtagccacgggattggtggtcctgatttcctcttcgtctgtaatcatgaccttttcaatgtccacattagtttttcccgagtcttgttttccaaagatgagaaccccgctctgaggaaaaaacttttcttcatcgtccttgtggctggccatggccgggcccggattcaccagagagtctcttccattaaggtggtacttggtagctccagtccacgagtattcactgttgttgttatccgcagatgtctttgatactcgctgctggcggtaacagggtccaggaagccagttcctagactggtcccgaatgtcacttgctccggcctgagaaaactgaagccttgactgcgtggtggttccgcttggagtgtttgttctgctcaagtaatacaggtactggtcgatgagaggattcatgagacggtccaaactctggctgtgggcgtagctgctgtggaaaggaacgtcctcaaaggtgtagctgaaggtaaagttgtttccggtacgcagcatctgagaaggaaagtactccaggcagtaaaatgaagagcgtcctactgcctgactcccgttgttcagggtgaggtatccatactgtggcaccatgaagacgtctgctgggaacggcgggaggcatccttgatgcgccgagccgaggacgtacgggagctggtactccgagtcagtaaacacctgaaccgtgctggtaaggttattggcaatcgtcgtcgtaccgtcattctgcgtgacctccttgacttgaatgttaaagagcttgaagttgagtcttttgggccggaatccccaattgttgttgatgagtctttgccagtcacgtggcgaaaagtggcagtggaatctgttgaagtcaaaatacccccaaggggtgctgtagccaaagtagtggttgtcgtttgaggctcctgattggctggaaatctgcttgtagaggtggttgttgtaggtgggcagagcccaggtgcgggtgctggtggtgatgactctgtcgcccatccatgtggaatcgcaatgccaatttcccgaggaattacccactccgtcggcgccctcgttattgtctgccattggtgcgccactgcctgtagccatcgtattagttcccagaccagagggggctgctggtggctgtccgagaggctgggggtcaggtacggagtctgcgtctccagtctgaccgaaattcaatctctttcttgcaggctgctggcccgcttttccggttcccgaggaggagtctggctccgcaggagagtgctctaccggcctcttttttcccggagccgtcttaacaggttcctcaaccaggcccagaggttcaagaaccctctttttcgcctggaagactgctcgtccgaggttgcccccaaaagacgtatcttctttaagacgctcctggaactccgcgtcggcgtggttgtacttggggtacgggttgtctccgctgtcgagctgccggtcgtaggccttgtcgtgctcgagggccgcggcgtctgcctcgttgaccggctctcccttgtcgagtccgttgaagggtccaaggtacttgtacccaggaagcacaagacccctgctgtcgtccttatgccgctctgcgggctttggtggtggtgggccaggtttgagcttccaccactgtcttattccttcagagagagtgtcctcgagccaatctggaagataaccatcggcagccatacctgatttaaatcatttattgttcagagatgcagtcatccaaatccacattgaccagatcgcaagcagtgcaagcgtctggcacctttcccatgatatgatgaatgtagcacagtttctgatacgcctttttgacgacagaaacgggttgagattctgacacgggaaagcactctaaacagtctttctgtccgtgagtgaagcagatatttgaattctgattcattctctcgcattgtctgcagggaaacagcatcagattcatgcccacgtgacgagaacatttgttttggtacctgtccgcgtagttgattgaagcttccgcgtctgacgtcgatggctgcgcaactgactcgcgcgcccgtttgggctcacttatatctgcgtcactgggggcgggtctttttttggctccaccctttttgacgtagaattcatgctctacctcaaccacgtgatcctttgcccaccggaaaaagtctttgacttcctgcttggtgaccttcccaaagtcatgatccagacggcgggtgagttcaaatttgaacatccggtcttgcaacggctgctggtgttcgaaggtcgttgagttcccgtcaatcactgcgcacatgttggtgttggaggtgacaatcacgggagtcgggtctatctgggccgaggacttgcatttctggtccacgcgcaccttgcttcctccgagaatggctttggccgactccacgaccttggcggtcatcttcccctcctcccaccagatcaccatcttgtcgacgcaatcattgaaaggaaagttctcattggtccagttgacgcagccgtagaaagggcgaattcgtttaaacctgcaggactagtccctttagtgagggt

SEQ ID NO: 225 - DNA, 3161 bp, Adeno-associated virus
aattgaatttagcggccgcgaattcgcccttcgcagagaccaaagttcaactgaaacgaattaaacggtttattgattaacaagcaattacagattacgagtcaggtatctggtgccaatggggcgaggctctgaatacacaccattagtgtccacagtaaagtccacattaacagatttgttgtagttggaagtgtactgaatctcgggattccagcgtttgctgttctccttctgcagctcccactcgatctccacgctgacctgccccgtggagtactgtgtaatgaaggaagcaaactttgccgcactgaaggtagtcgaaggattcgcaggtaccggggtgttcttgatgagaatctgcgggggagggtgtttaagtccgaatccgcccatgaggggagaggggtgaaaatgtccgtccgtgtgtggaatctttgcccagatgggcccctgcaggtacacgtctctgtcctgccacaccatgcctggaagaacgccttgtgtgttgacatctgaggtagctgcttgtgtgttgccgctctggaggttggtagatacagaaccatactgctccgtagccacgggattggtggtcctgatttcctcttcgtctgtaatcatgaccttttcaatgtccacattagtttttcccgagtcttgttttccaaagatgagaaccccgctctgaggaaaaaacttttcttcatcgtccttgtggctggccatggccgggcccggattcaccagagagtctcttccattaaggtggtacttggtagctccagtccacgagtattcactgttgttgttatccgcagatgtctttgatactcgctgctggcggtaacagggtccaggaagccagttcctagactggtcccgaatgtcacttgctccggcctgagaaaactgaagccttgactgcgtggtggttccgcttggagtgtttgttctgctcaagtaatacaggtactggtcgacgagaggattcatgagacggtccaaactctggctgtgggcgtagctgctgtggaaaggaacgtcctcaaaggtgtagctgaaggtaaagttgtttccggtacgcagcatctgagaaggaaagtactccaggcagtaaaatgaagagcgtcctactgcctgactcccgttgttcagggtgaggtatccatactgtggcaccatgaagacgtctgctgggaacggcgggaggcatccttgatgcgccgagccgaggacgtacgggagctggtactccgagtcagtaaacacctgaaccgtgctggtaaggttattggcaatcgtcgtcgtaccgtcattctgcgtgacctccttgacttgaatgttaaagagcttgaagttgagtcttttgggccgggatccccaattgttgttgatgagtctttgccagtcacgtggcgaaaagtggcagtggaatctgttgaagtcaaaatacccccaaggggtgctgtagccaaagtagtggttgtcgtttgaggctcctgattggctggaaatctgcctgtagaggtggttgttgtaggtgggcagagcccaggtgcgggtgctggtggtgatgactctgtcgcccatccatgtggaatcgcaatgccaatttcccgaggaattacccactccgtcggcgccctcgttattgtctgccattggtgcgccactgcctgtagccatcgtattagttcccagaccagagggggctgctggtggctgtccgagaggctgggggtcaggtacggagtctgcgtctccagtctgaccgaaattcaatctccttcttgcaggctgctggcccgcttttccggttcccgaggaggagtctggctccgcaagagagtgctctaccggcctcttttttcccggagccgtcttaacaggttcctcaaccaggcccagaggttcaagaaccctctttttcgcctggaagactgctcgtccgaggttgcccccaaaagacgtatcttctttaagacgctcctggaactccgcgtcggcgtggttgtacttgaggtacgggttgtctccgccgtcgagctgccggtcgtaggccttgtcgtgctcgagggccgcggcgtctgcctcgttgaccggctctcccttgtcgagtccgttgaagggtccaaggtacttgtacccaggaagcacaagacccctgctgtcgtccttatgccgctctgcgggctttggtggtggtgggccaggtttgagcttccaccactgtcttattccttcagagagagtgtcctcgagccaatctggaagataaccatcggcagccatacctgatttaaatcatttattgttcagagatgcagtcatccaaatccacattgaccagatcgcaagcagtgcaagcgtctggcacctttcccatgatatgatgaatgtagcacagtttctgatacgcctttttgacgacagaaacgggttgagattctgacacgggaaagcactctaaacagtctttctgtccgtgagtgaagcagatatttgaattctgattcattctctcgcattgtctgcagggaaacagcatcagattcatgcccacgtgacgagaacatttgttttggtacctgtccgcgtagttgattgaagcttccgcgtctgacgtcgatggctgcgcaactgactcgcgcgcccgtttgggctcacttatatctgcgtcactgggggcgggtctttttttggctccaccctttttgacgtagaattcatgctctacctcaaccacgtgatcctttgcccaccggaaaaagtctttgacttcctgcttggtgaccttcccaaagtcatgatccagacggcgggtgagttcaaatttgaacatccggtcttgcaacggctgctggtgttcgaaggtcgttgagttcccgtcaatcactgcgcacatgttggtgttggaggtgacaatcacgggagtcgggtctatctgggccgaggacttgcatttctggtccacgcgcaccttgcttcctccgagaatggctttggccgactccacgaccttggcggtcatcttcccctcctcccaccagatcaccatcttgtcgacgcaatcattgaaaggaaagttctcattggtccagttgacgcagcaagggcgaattcgtttaaacctgcaggactagtccctttagtgaggg

SEQ ID NO: 226 - DNA, 3172 bp, Adeno-associated virus
gattgaatttagcggccgcgaattcgcccttgctgcgtcaactggaccaatgagaactttcccttcaacgattgcgtcgacaagatggtgatctggtgggaggagggcaagatgaccgccaaggtcgtggagtccgccaaggccattctgggtggaagcaaggtgcgcgtggaccaaaagtgcaagtcatcggcccagatcgaccccacgcccgtgatcgtcacctccaacaccaacatgtgcgccgtgatcgacgggaacagcaccaccttcgagcaccagcagcccctgcaggaccgcatgttcaagttcgagctcacccgccgtctggagcacgactttggcaaggtgaccaagcaggaagtcaaagagttcttccgctgggctcaggatcacgtgactgaggtggcgcatgagttctacgtcagaaagggcggagccaccaaaagacccgcccccagtgacgcggatataagcgagcccaagcgggcctgcccctcagttgcggagccatcgacgtcagacgcggaagcaccggtggactttgcggacaggtaccaaaacaaatgttctcgtcacgcgggcatgcttcagatgctgtttccctgcaagacatgcgagagaatgaatcagaatttcaacgtctgcttcacgcacggggtcagagactgctcagagtgcttccccggcgcgtcggaatctcaacccgtcgtcagaaaaaagacgtatcagaaactgtgcgcgattcatcatctgctggggcgggcacccgagattgcgtgttcggcctgcgatctcgtcaacgtggacttggatgactgtgtttctgagcaataaatgacttaaaccaggtatggctgctgacggttatcttccagattggctcgaggacaacctctctgagggcattcgcgagtggtgggacctgaaacctggagcccccaagcccaaggccaaccagcagaagcaggacgacggccggggtctggtgcttcctggctacaagtacctcggacccttcaacggactcgacaagggggagcccgtcaacgcggcggacgcagcggccctcgagcacgacaaggcctacgaccagcagctcaaagcgggtgacaatccgtacctgcggtataaccacgccgacgccgagtttcaggagcgtctgcaagaagatacgtcttttgggggcaacctcgggcgagcagtcttccaggccaagaagcgggttctcgaacctctcggtctggttgaggaagctgctaagacggctcctggaaagaagagaccggtagaaccgtcacctcagcgttcccccgactcctccgcgggcatcggcaagaaaggccagcagcccgctaaaaagagactgaactttggtcagactggcgactcagagtcagtccccgaccctcaaccaatcggagaaccaccagcaggcccctctggtctgggatctggtacaatggctgcaggcggtggcgctccaatggcagacaataacgaaggcgccgacggagtgggtagttcctcaggaaattggcattgcgattccacatggctgggcgacagagtcatcaccaccagcacccgaacctgggccctgcccacctacaacaaccacctctacaagcaaatatccaatgggacatcgggaggaagcaccaacgacaacacctacttcggctacagcaccccctgggggtattttgacttcaacagattccactgccacttctcaccacgtgactggcagcgactcatcaacaacaactggggattccggccaaaaagactcagcttcaagctcttcaacatccaggtcaaggaggtcacgcagaatgaaggcaccgagaccatcgccaataaccttaccagcacgattcaggtatttacggactcggaataccagctgccgtacgtcctcggctccgcgcaccagggctgcctgcctccgttcccggcggacgtcttcatgattccccagtacggctaccttacactgaacaatggaagtcaagccgtaggccgttcctccttctactgcctggaatattttccatctcaaatgctgcgaactggaaacaattttgaattcagctacaccttcgaggacgtgcctttccacagcagctgcgcacacagccagagctcggaccgactgatgaatcctctcatcgaccagtacctgtactacttatccagaactcggtccacaggaggaactcaaggtacccagcaattgttattttctcaagctgggcctgcaaacatgtcggctcaggctaagaactggctacctggaccttgctaccggcagcagcgagtctctacgacactgtcgcaaaacaacaacagcaactttgcttggactggtgccaccaaatatcacctgaacggaagagactctttggtaaatcccggtgtcgccatggcaacccacaaggacgacgaggaacgcttcttcccgtcgagtggagtcctgatgtttggaaaacagggtgctggaagagacaatgtggactacagcagcgttatgctaaccagcgaagaagaaattaaaaccactaaccctgtagccacagaacaatacggtgtggtggctgacaacttgcagcaaaccaatacagggcctattgtgggaaatgtcaacagccaaggagccttacctggcatggtctggcagaaccgagacgtgtacctgcagggtcccatctgggccaagattcctcacacggacggcaacttccacccttcaccgctaatgggaggatttggactgaagcacccacctcctcagatcctgatcaagaacacgccggtacctgcggatcctccaacaacgttcagccaggcgaaattggcttccttcattacgcagtacagcaccggacaggtcagcgtggaaatcgagtgggagctgcagaaggagaacagcaaacgctggaacccagagattcagtacacttcaaactactacaaatctacaaatgtggactttgctgtcaatacagagggaacttattctgagcctcgccccattggtactcgttacctcacccgtaatctgtaattgctggttaatcaataaaccgtttgattcgtttcagttgaactttggtctctgcgaagggcgaattcgtttaaacctgcaggactagtccctttagtgagg

SEQ ID NO: 227 - DNA, 3172 bp, Adeno-associated virus
gattgaatttagcggccgcgaattcgcccttgctgcgtcaactggaccaatgagaactttcccttcaacgattgcgtcgacaagatggtgatctggtgggaggagggcaagatgaccgccaaggtcgtggagtccgccaaggccattctgggtggaagcaaggtgcgcgtggaccaaaagtgcaagtcatcggcccagatcgaccccacgcccgtgatcgtcacctccaacaccaacatgtgcgccgtgatcggcgggaacagcaccaccttcgagcaccagcagcccctgcaggaccgcatgttcaagttcgagctcacccgccgtctggagcacgactttggcaaggtgaccaagcaggaagtcaaagagttcttccgctgggctcaggatcacgtgactgaggtggcgcatgagttctacgtcagaaagggcggagccaccaaaagacccgcccccagtgacgcggatataagcgagcccaagcgggcctgcccctcagttgcggagccatcgacgtcagacgcggaagcaccggtggactttgcggacaggtaccaaaacaaatgttctcgtcacgcgggcatgcttcagatgctgtttccctgcaagacatgcgagagaatgaatcagaatttcaacgtctgcttcacgcacggggtcagagactgctcagagtgcctccccggcgcgtcagaatctcaacccgtcgtcagaaaaaagacgtatcagaaactgtgcgcgattcatcatctgctggggcgggcacccgagattgcgtgttcggcctgcgatctcgtcaacgtggacttggatgactgtgtttctgagcaataaatgacttaaaccaggtatggctgctgacggttatcttccagattggctcgaggacaacctctctgagggcattcgcgagtggtgggacctgaaacctggagcccccaagcccaaggccaaccagcagaagcaggacgacggccggggtctggtgcttcttggctacaagtacctcggacccttcaacggactcgacaagggggagcccgtcaatgcggcggacgcagcggccctcgagcacgacaaggcctacgaccagcagctcaaagcgggtgacaatccgtacctgcggtataaccacgccgacgccgagtttcaggagcgtctgcaagaagatacgtcttttgggggcaacctcgggcgagcagtcttccaggccaagaagcgggttctcgaacctctcggtctggttgaggaagctgctaagacggctcctggaaagaagagaccggtagaaccgtcacctcagcgttcccccgactcctccacgggcatcggcaagaaaggccagcagcccgctaaaaagagactgaactttggtcagactggcgactcagagtcagtccccgaccctcaaccaatcggagaaccaccagcaggcccctctggtctgggatctggtacaatggctgcaggcggtggcgctccaatggcagacaataacgaaggcgccgacggagtgggtagttcctcaggaaattggcattgcgattccacatggctgggcgacagagtcatcaccaccagcacccgaacctgggccctgcccacctacaacaaccacctctacaagcaaatatccaatgggacatcgggaggaagcaccaacgacaacacctacttcggctacagcaccccctgggggtattttgacttcaacagattccactgccacttctcaccacgtgactggcagcgactcatcaacaacaactggggattccggccaaaaagactcagcttcaagctcttcaacatccaggtcaaggaggtcacgcagaatgaaggcaccaagaccatcgccaataaccttaccagcacgattcaggtatttacggactcggaataccagctgccgtacgtcctcggctccgcgcaccagggctgcctgcctccgttcccggcggacgtcttcatgattccccagtacggctaccttacactgaacaatggaagtcaagccgtaggccgttcctccttctactgcctggaatattttccatctcaaatgctgcgaactggaaacaattttgaattcagctacaccttcgaggacgtgcctttccacagcggctacgcacacagccagagcttggaccgactgatgaatcctctcatcgaccagtacctgtactacttatccagaactcagtccacaggaggaactcaaggtacccagcaattgttattttctcaagctgggcctgcaaacatgtcggctcaggctaagaactggctacctggaccttgctaccggcagcagcgagtctctacgacactgtcgcaaaacaacaacagcaactttgcttggactggtgccaccaaatatcacctgaacggaagagactctttggtaaatcccggtgtcgccatggcaacccacaaggacgacgaggaacgcttcttcccgtcgagtggagtcctgatgtttggaaaacagggtgctggaagagacaatgtggactacagcagcgttatgctaaccagcgaagaagaaattaaaaccactaaccctgtagccacagaacaatacggtgtggtggctgacaacttgcagcaaaccaatacagggcctattgtgggaaatgtcaacagccaaggagccttacctggcatggtctggcagaaccgagacgtgtacctgcagggtcccatctgggccaagattcctcacacggacggcaacttccacccttcaccgctaatgggaggatttggactgaagcacccacctcctcagatcctgatcaagaacacgccggtacctgcggatcctccaacgacgttcagccaggcgaaattggcttccttcattacgcagtacagcaccggacaggtcagcgtggaaatcgagtgggagctgcagaaggagaacagcaaacgctggaacccagagattcagtacacttcaaactactacaaatctacaaatgtggactttgctgtcaatacagagggaacttattctgagcctcgccccattggtactcgttacctcacccgtaatctgtaattgctggttaatcaataaaccgtttgattcgtttcagttgaactttggtctctgcgaagggcgaattcgtttaaacctgcaggactagtccctttagtgagg

SEQ ID NO: 228 - DNA, 2208 bp, Adeno-associated virus
atggctgccgatggttatcttccagattggctcgaggacactctctctgaaggaataagacagtggtggaagctcaaacctggcccaccaccaccaaagcccgcagagcggcataaggacgacagcaggggtcttgtgcttcctgggtacaagtacctcggacccttcaacggactcgacaagggagagccggtcaacgaggcagacgccgcggccctcgagcacgacaaggcctacgaccggcagctcgaaagcggagacaacccgtacctcaagtacaaccacgccgacgcggagtttcaggagcgtcttaaagaagatacgtcttttgggggcaacctcggacgagcagtcttccaggcgaaaaagagggttcttgaacctctgggcctggttgaggagcctgttaaaacggctccgggaaaaaagaggccggtagagcactctcctgtggagccagactcctcctcgggaaccggaaaagcgggccagcagcctgcgagaaaaagattgaattttggtcagactggagacgcagactccgtacctgacccccagcctctcggacagccaccagcagccccctctggtctgggatctactacaatggcttcaggcagtggcgcaccagtggcagacaataacgagggtgccgatggagtgggtaattcctcaggaaattggcattgcgattcccaatggctgggcgacagagtcatcaccaccagcacccgaacctgggccctgcccacctacaacaaccacctctacaagcaaatctccagccaatcaggagcctcaaacgacaaccactactttggctacagcaccccctgggggtattttgacttcaacagattccactgccacttttcaccacgtgactggcaaagactcatcaacaacagctggggattccgacccaaaagactcaacttcaagctctttaacattcaagtcaaagaggtcacgcagaatgacggtacgacgacgattgccaataaccttaccagcacggttcaagtgtttaccgactcggagtaccagctcccgtacgtcctcggctcggcgcatcaaggatgcctcccgccgttcccagcagacgtctttatggtcccacagtatggatacctcaccctgaacaacgggagtcaggcggtaggacgctcttccttttactgcctggagtactttccttctcagatgctgcgtactggaaacaactttcagttcagctacacctttgaagacgttcccttccacagcagctacgctcacagccagagtctggatcggctgctgaatcctctgatcgaccagtacctatattatctgaacaagacacaatcaaatagtggaactcttcagcagtctcggctactgtttagccaagctggacccaccagcatgtctcttcaagctaaaaactggctgcctggaccttgctacagacagcagcgtctgtcaaagcaggcaaacgacaacaacaacagcaactttccctggactgcggctacaaagtatcatctaaatggccgggactcgttggttaatccaggaccagctatggccagccacaaagacgatgaagaaaagtttttccccatgcatggaaccctgatatttggtaaacaaggaacaaatgctaacgacgcggatttggacaatgtcatgattacagatgaagaagaaatccgcaccaccaatcccgtggctacggagcagtacggatatgtgtcaaataatttgcaaaactcaaatactggtccaactactggaactgtcaatcaccaaggagcgttacctggtatggtgtggcaggatcgagacgtgtacctgcagggacccatttgggccaagattcctcacacggacgggcactttcatccttctccactaatgggaggttttgggctcaaacacccgcctcctcagatcatgatcaaaaacactcccgttccagccaatcctcctacaaacttcagttcttccaagtttgcttctttcatcacacagtattccacggggcaggtcagcgtggagatcgagtgggagctgcagaaggagaacagcaaacgctggaatcccgaaattcagtatacttccaactacaacaaatctgttaatgtggactttactgtggacactaatggtgtgtattcagagcctcgccccattggcaccagatacccgactcgtaatctgtaa

SEQ ID NO: 229 - protein, 735 aa, Adeno-associated virus
MAADGYLPDWLEDTLSEGIRQWWKLKPGPPPPKPAERHKDDSRGLVLPGYKYLGPFNGLDKGEPVNEADAAALEHDKAYDRQLESGDNPYLKYNHADAEFQERLKEDTSFGGNLGRAVFQAKKRVLEPLGLVEEPVKTAPGKKRPVEHSPVEPDSSSGTGKAGQQPARKRLNFGQTGDADSVPDPQPLGQPPAAPSGLGSTTMASGSGAPVADNNEGADGVGNSSGNWHCDSQWLGDRVITTSTRTWALPTYNNHLYKQISSQSGASNDNHYFGYSTPWGYFDFNRFHCHFSPRDWQRLINNSWGFRPKRLNFKLFNIQVKEVTQNDGTTTIANNLTSTVQVFTDSEYQLPYVLGSAHQGCLPPFPADVFMVPQYGYLTLNNGSQAVGRSSFYCLEYFPSQMLRTGNNFQFSYTFEDVPFHSSYAHSQSLDRLLNPLIDQYLYYLNKTQSNSGTLQQSRLLFSQAGPTSMSLQAKNWLPGPCYRQQRLSKQANDNNNSNFPWTAATKYHLNGRDSLVNPGPAMASHKDDEEKFFPMHGTLIFGKQGTNANDADLDNVMITDEEEIRTTNPVATEQYGYVSNNLQNSNTGPTTGTVNHQGALPGMVWQDRDVYLQGPIWAKIPHTDGHFHPSPLMGGFGLKHPPPQIMIKNTPVPANPPTNFSSSKFASFITQYSTGQVSVEIEWELQKENSKRWNPEIQYTSNYNKSVNVDFTVDTNGVYSEPRPIGTRYPTRNL

SEQ ID NO: 230 - DNA, 2208 bp, Adeno-associated virus
atggctgccgatggttatcttccagattggctcgaggacactctctctgaaggaataagacagtggtggaagctcaaacctggcccaccaccaccaaagcccgcagagcggcataaggacgacagcaggggtcttgtgcttcctgggtacaagtacctcggacccttcaacggactcgacaagggagagccggtcaacgaggcagacgccgcggccctcgagcacgacaaggcctacgaccggcagctcgacagcggagacaacccgtacctcaagtacaaccacgccgacgcggagtttcaggagcgtcttaaagaagatacgtcttttgggggcaacctcggacgagcagtcttccaggccaaaaagaggattcttgaacctctgggcctggttgaggaacctgttaagacggctccgggagaaaagaggccggtagagcactctcctgcggagccagactcctcctcgggaaccggaaaagcgggccagcagcctgcaagaaagagattgaattttggccagactggagacgcagactcagtacctgacccccagcctctcggacagccaccagcagccccctctggtctgggaactaatacgatggcttcaggcagtggcgcaccaatggcagacaataacgagggcgccgacggagtgggtaattcctcgggaaattggtattgcgattccacatggatgggcgacagagtcatcaccaccagcacccgcacctgggccctgcccacctacaacaaccatctgtacaagcaaatctccagccagtctggagccagcaacgacaaccactactttggctacagcaccccctgggggtattttgacttcaacagattccactgccacttctccccacgtgactggcaaagactcatcaacaacaactggggattccggcccaagagactcagcttcaagctctttaacattcaagtcaaagaggtcacgcagaatgacggtacgacgacgattgccaataaccttaccagcacggttcaggtgtttactgactcggagtaccagctcccgtacgtcctcggctcggcgcatcaaggatgcctcccgccgttcccagcagacgtcttcatggtgccacagtatggatacctcaccctgaacaacggcagtcaggcggtaggacgctcttccttttactgcctggagtactttccttctcagatgcttcgtaccggaaacaactttaccttcagctacacctttgaagacgttcctttccatagcagctacgctcacagccaaagtctggaccgtctcatgaatcctctcatcgaccagtacctgtattacttgagcagaacaaacactccaagcggaaccaccacgatgtccaggcttcagttttctcaggccggagcaagtgacattcgggaccagtctagaaactggcttcctggaccctgttaccgccagcagcgagtatcaaagacagctgcggacaacaacaacagtgattactcgtggactggagctaccaagtaccacctcaatggaagagactctctggtgaatccgggcccagctatggccagccacaaggacgatgaagaaaaatattttcctcagagcggggttctcatctttggaaaacaagactcgggaaaaactaatgtggacattgaaaaggttatgattacagacgaagaggaaatcaggaccaccaatcccgtggctacggagcagtatggttctgtatctaccaacctccagagcggcaacacacaagcagctacctcagatgtcaacacacaaggcgttcttccaggcatggtctggcaggacagagacgtgtacctgcaggggcccatctgggcaaagattccacacacggacggacattttcacccctctcccctcgtgggcggattcggacttaaacaccctcctccacaaattctcatcaagaacaccccggtacctgcgaatccttcgaccactttcagtgcggcaaagtttgcttccttcatcacacagtactccacggggcaggtcagcgtggagatcgagtgggagctgcagaaggagaacagcaaacgctggaatcccgaaattcagtacacttccaactacaacaaatctgttaatgtggactttactgtggacactaatggtgtgtattcagagcctcgccccattggcaccagatacctgactcgtaatctgtaa

SEQ ID NO: 231 - protein, 735 aa, Adeno-associated virus
MAADGYLPDWLEDTLSEGIRQWWKLKPGPPPPKPAERHKDDSRGLVLPGYKYLGPFNGLDKGEPVNEADAAALEHDKAYDRQLDSGDNPYLKYNHADAEFQERLKEDTSFGGNLGRAVFQAKKRILEPLGLVEEPVKTAPGEKRPVEHSPAEPDSSSGTGKAGQQPARKRLNFGQTGDADSVPDPQPLGQPPAAPSGLGTNTMASGSGAPMADNNEGADGVGNSSGNWYCDSTWMGDRVITTSTRTWALPTYNNHLYKQISSQSGASNDNHYFGYSTPWGYFDFNRFHCHFSPRDWQRLINNNWGFRPKRLSFKLFNIQVKEVTQNDGTTTIANNLTSTVQVFTDSEYQLPYVLGSAHQGCLPPFPADVFMVPQYGYLTLNNGSQAVGRSSFYCLEYFPSQMLRTGNNFTFSYTFEDVPFHSSYAHSQSLDRLMNPLIDQYLYYLSRTNTPSGTTTMSRLQFSQAGASDIRDQSRNWLPGPCYRQQRVSKTAADNNNSDYSWTGATKYHLNGRDSLVNPGPAMASHKDDEEKYFPQSGVLIFGKQDSGKTNVDIEKVMITDEEEIRTTNPVATEQYGSVSTNLQSGNTQAATSDVNTQGVLPGMVWQDRDVYLQGPIWAKIPHTDGHFHPSPLVGGFGLKHPPPQILIKNTPVPANPSTTFSAAKFASFITQYSTGQVSVEIEWELQKENSKRWNPEIQYTSNYNKSVNVDFTVDTNGVYSEPRPIGTRYLTRNL

SEQ ID NO: 232 - DNA, 2209 bp, Adeno-associated virus
atggctgccgatggttatcctccagattggctcgaggacactctctctgaagggataagacagtggtggaagctcaaacctggcccaccaccaccaaagcccgcagagcggcataaggacgacagcaggggtcttgtgcttcctgggtacaagtacctcggacccttcaacggactcgacaagggggagccggtcaacgaggcagacgccgcggccctcgagcacgacaaggcctacgaccggcagctcgacagcggagacaacccgtacctcaagtacaaccacgccgacgcagagtttcaggagcgccttaaagaagatacgtcttttgggggcaacctcggacgagcagtcttccaggcgaaaaagagggttcttgaacctctgggcctggttgaggaacctgttaagacggctccgggaaaaaagaggccggtagagcactctcctgtggagccagactcctcctcgggaaccggaaaagcgggccagcggcctgcaagaaaaagattaaattttggtcagactggagacgcagactccgtacctgacccccagcctctcggacagccaccagcagccccctctggtctgggatctactacaatggctacaggcagtggcgcaccaatggcagacaataacgagggtgccgatggagtgggtaattcctcaggaaattggcattgcgattcccaatggctgggcgacagagtcatcaccaccagcacccgaacctgggccctgcccacatacaacaaccacctctacaagcaaatctccagccaatcaggagccagcaacgacaaccactactttggctacagcaccccctgggggtattttgacttcaacagattccactgccacttttcaccacgtgactggcaaagactcatcaacaacaactggggattccggcccaaaagactcaacttcaagctctttaatattcaagtcaaagaggtcacgcagaatgacggtacgacgacgattgccaataaccttaccagcacggttcaggtgtttactgactcggagtaccagctcccgtacgtcctgggctcggcgcatcaaggatgcctcccgccgtttccagcggacgtcttcatggtcccacagtatggatacctcaccctgaacaacgggagtcaggcggtaggacgctcttccttttactgcctggagtactttccttctcagatgctgcgtactggaaacaactttcagttcagctacacttttgaagacgtgcctttccacagcagctacgctcacagccagagtctggatcggctgatgaatcctctgatcgaccagtacctgtattatctgaacaagacacaaacaaatagtggaactcttcagcagtctcggctactgtttagccaagctggaccaaccaacatgtctcttcaagctaaaaactggctgcctggaccttgctacagacagcagcgtctgtcaaaacaggcaaacgacaacaacaacagcaactttccctggactgcagctacaaagtatcatctaaatggccgggactcgttggttaatccaggaccagctatggccagtcacaaggatgacgaagaaaagtttttccccatgcatggaaccctgatatttggtaaacaaggaacaaatgccaacgacgcggatttggaaaatgtcatgattacagatgaagaagaaatcagggccaccaatcccgtggctacggagcagtacgggactgtgtcaaataatttgcaaaactcaaacactggtccaactactggaactgtcaatcgccaaggagcgttacctggtatggtgtggcaggatcgagacgtgtacctgcagggacccatttgggccaagattcctcacaccgatggacactttcatccttctccactgatgggaggttttggactcaaacacccgcctcctcagatcatgatcaaaaacactcccgttccagccaatcctcccacaaacttcagttctgccaagtttgcttctttcatcacacagtattccacgggacaggtcagcgtggagatcgagtgggagctgcagaaggagaacagcaaacgctggaatcccgaaattcagtacacttccaactacaacaagtctgttaatgtggactttactgtggacactaatggtgtgtattcagagcctcgccccattggcaccagatacctgactcgtaatctgtaat

SEQ ID NO: 233 - protein, 735 aa, Adeno-associated virus
MAADGYPPDWLEDTLSEGIRQWWKLKPGPPPPKPAERHKDDSRGLVLPGYKYLGPFNGLDKGEPVNEADAAALEHDKAYDRQLDSGDNPYLKYNHADAEFQERLKEDTSFGGNLGRAVFQAKKRVLEPLGLVEEPVKTAPGKKRPVEHSPVEPDSSSGTGKAGQRPARKRLNFGQTGDADSVPDPQPLGQPPAAPSGLGSTTMATGSGAPMADNNEGADGVGNSSGNWHCDSQWLGDRVITTSTRTWALPTYNNHLYKQISSQSGASNDNHYFGYSTPWGYFDFNRFHCHFSPRDWQRLINNNWGFRPKRLNFKLFNIQVKEVTQNDGTTTIANNLTSTVQVFTDSEYQLPYVLGSAHQGCLPPFPADVFMVPQYGYLTLNNGSQAVGRSSFYCLEYFPSQMLRTGNNFQFSYTFEDVPFHSSYAHSQSLDRLMNPLIDQYLYYLNKTQTNSGTLQQSRLLFSQAGPTNMSLQAKNWLPGPCYRQQRLSKQANDNNNSNFPWTAATKYHLNGRDSLVNPGPAMASHKDDEEKFFPMHGTLIFGKQGTNANDADLENVMITDEEEIRATNPVATEQYGTVSNNLQNSNTGPTTGTVNRQGALPGMVWQDRDVYLQGPIWAKIPHTDGHFHPSPLMGGFGLKHPPPQIMIKNTPVPANPPTNFSSAKFASFITQYSTGQVSVEIEWELQKENSKRWNPEIQYTSNYNKSVNVDFTVDTNGVYSEPRPIGTRYLTRNL

SEQ ID NO: 234 - DNA, 2208 bp, Adeno-associated virus
atggctgccgatggttatcttccagattggctcgaggacactctctctgaaggaataagacagtggtggaagctcaaacctggcccaccaccaccaaagcccgcagagcggcataaggacgacagcaggggtcttgtgcttcctgggtacaggtacctcggacccttcaacggactcgacaagggagagccggtcaacgaggcagacgccgcggccctcgagcacgacaaggcctacgaccggcagctcgacagcggagacaacccgtacctcaagtacaaccacgtcgacgcggagtttcaggagcgtcttaaagaagatacgtcttttgggggcaacctcggacgagcagtcttccaggccaaaaagaggattcttgaacctctgggcctggttgaggaacctgttaaggcggctccgggagaaaagaggccggtagagcactctcctgcggagccagactcctcctcgggaaccggaaaagcgggccagcagcctgcaagaaagagattgaattttggtcagactggagacgcagactcagtacctgacccccagcctctcggacagccaccagcagccccctctggtctgggaactaatacgatggcttcaggcagtggcgcaccaatggcagacaataacgagggcgccgacggagtgggtaattcctcgggaaattggcattgcgattccacatggatgggcgacagagtcatcaccaccagcacccgcacctgggccctgcccacctacaacaaccatctgtacaagcaaatctccagccagtctggagccagcaacgacaaccactactttggctacagcaccccctgggggcattttgacttcaacagattccactgccacttctccccacgtgactggcaaagactcatcaacaacaactggggattccggcccaagagactcagcttcaagctctttaacattcaagtcaaagaggtcacgcagaatgacggtacgacgacgattgccaataaccttaccagcacggttcaggtgtttactgactcggagtaccagctcccgtacgtcctcggctcggcgcatcaaggatgcctcccgccgttcccagcagacgtcttcatggtgccacagtatggatacctcaccctgaacaacggcagtcaggcggtaggacgctcttccttttactgcctggagtactttccttctcagatgcttcgtaccggaaacaactttaccttcagctacacctttgaagacgttcctttccatagcagctacgctcacagccaaagtctggaccgtctcatgaatcctctcatcgaccagtacctgtattacttgagcagaacaaacactccaagcggaaccaccacgatgtccaggcttcagttttctcaggccggagcaagtgacattcgggaccagtctagaaactggcttcctggaccctgttaccgccagcagcgagtatcaaagacagctgcggacaacaacaacagtgattactcgtggactggagctaccaagtaccacctcaatggaagagactctctggtgaatccgggcccagctatggccagccacaaggacgatgaagaaaaatattttcctcagagcggggttctcatctttggaaaacaagactcgggaaaaactaatgtggacattgaaaaggttatgattacagacgaagaggaaatcaggaccaccaatcccgtggctacggagcagtatggttctgtatctaccaacctccagagcggcaacacacaagcagctacctcagatgtcaacacacaaggcgttcttccaggcatggtctggcaggacagagacgtgtacctgcaggggcccatctgggcaaagattccacacacggacggacattttcacccctctccccccatgggcggattcggacttaaacaccctcctccacaaattctcatcaagaacaccccggtacctgcgaatccttcgaccactttcagtgcggcaaagtttgcttccttcatcacacagtactccacggggcaggtcagcgtggagatcgagtgggagctgcagaaggagaacagcaaacgctggaatcccgaaattcagtacacttccaactacaacaaatctgttaatgtggactttactgtggacactaatggtgtgtattcagagcctcgccccattggcgccagatacctgactcgtaatctgtaa

SEQ ID NO: 235 - protein, 735 aa, Adeno-associated virus
MAADGYLPDWLEDTLSEGIRQWWKLKPGPPPPKPAERHKDDSRGLVLPGYRYLGPFNGLDKGEPVNEADAAALEHDKAYDRQLDSGDNPYLKYNHVDAEFQERLKEDTSFGGNLGRAVFQAKKRILEPLGLVEEPVKAAPGEKRPVEHSPAEPDSSSGTGKAGQQPARKRLNFGQTGDADSVPDPQPLGQPPAAPSGLGTNTMASGSGAPMADNNEGADGVGNSSGNWHCDSTWMGDRVITTSTRTWALPTYNNHLYKQISSQSGASNDNHYFGYSTPWGHFDFNRFHCHFSPRDWQRLINNNWGFRPKRLSFKLFNIQVKEVTQNDGTTTIANNLTSTVQVFTDSEYQLPYVLGSAHQGCLPPFPADVFMVPQYGYLTLNNGSQAVGRSSFYCLEYFPSQMLRTGNNFTFSYTFEDVPFHSSYAHSQSLDRLMNPLIDQYLYYLSRTNTPSGTTTMSRLQFSQAGASDIRDQSRNWLPGPCYRQQRVSKTAADNNNSDYSWTGATKYHLNGRDSLVNPGPAMASHKDDEEKYFPQSGVLIFGKQDSGKTNVDIEKVMITDEEEIRTTNPVATEQYGSVSTNLQSGNTQAATSDVNTQGVLPGMVWQDRDVYLQGPIWAKIPHTDGHFHPSPPMGGFGLKHPPPQILIKNTPVPANPSTTFSAAKFASFITQYSTGQVSVEIEWELQKENSKRWNPEIQYTSNYNKSVNVDFTVDTNGVYSEPRPIGARYLTRNL

SEQ ID NO: 236 - DNA, 2208 bp, Adeno-associated virus
atggctgccgatggttatcttccagattggctcgaggacaccctctctgaaggaataagacagtggtggaagctcaaacctggcccaccaccaccaaagcccgcagagcggcataaggacgacagcaggggtcttgtgcttcctgggtacaagtacctcggacccttcaacggactcgacaagggagagccggtcaacgaggcagacgccgcggccctcgagcacgacaaggcctacgaccggcagctcgacagcggagataacccgtacctcaagtacaaccacgccgacgcggagtttcaggagcgccttaaagaggatacgtcttttgggggcaacctcggacgagcagtcttccaggccaaaaagaggattcttgaacctctgggcctggttgaggaacctgttaagacggctccgggaaaaaagaggccggtagagcactctcctgcggagccagactcctcctcgggaaccggaaaagcgggccagcagcctgcaagaaagagattgaattttggtcagactggagacgcagactcagtacctgacccccggcctctcggacagccaccagcagccccctctggtctgggaactaatacgatggcttcaggcagtggcgcaccaatggcagacaataacgagggcgccgacggagtgggtaattcctcgggaaattggcattgcgattccacatggatgggcgacagagtcatcaccaccagcacccgcacctgggccctgcccacctacaacaaccatctgtacaagcaaatctccagccagtctggagccagcaacgacaaccactactttggctacagcaccccctgggggtattttgacttcaacagattccactgccacttctccccacgtgactggcaaagactcatcaacaacaactggggattccggcccaagagactcagcttcaagctctttaacattcaagtcaaagaggtcacgcagaatgacggtacgacgacgattgccaataaccttaccagcacggttcaggtgtttactgactcggagtaccagctcccgtacgtcctcggctcggcgcatcaaggatgcctcccgccgttcccagcagacgtcttcatggtgccacagtatggatacctcaccctgaacaacggcagtcaggcggtaggacgctcttccttttactgcctggagtactttccttctcagatgcttcgtaccggaaacaactttaccttcagctacacctttgaagacgttcctttccatagcagctacgctcacagccaaagtctggaccgtctcatgaatcctctcatcgaccagtacctgtattacttgagcagaacaaacactccaagcggaaccaccacgatgtccaggcttcagttttctcaggccggagcaagtgacattcgggaccagtctagaaactggcttcctggaccctgttaccgccagcagcgagtatcaaagacagctgcggacaacaacaacagtgattactcgtggactggagctaccaagtaccacctcaatggaagagactctctggtgaatccgggcccagctatggccagccacaaggacgatgaagaaaaatattttcctcagagcggggttctcatctttggaaaacaagactcgggaaaaactaatgtggacattgaaaaggttatgattacagacgaagaggaaatcaggaccaccaatcccgtggctacggagcagtatggttctgtatctaccaacctccagagcggcaacacacaagcagctacctcagatgtcaacacacaaggcgttcttccaggcatggtctggcaggacagagacgtgtacctgcaggggcccatctgggcaaagattccacacacggacggacattttcacccctctcccctcatgggcggattcggacttaaacaccctcctccacaaattctcatcaagaacaccccggtacctgcgaatccttcgaccactttcagtgcggcaaagtttgcttccttcatcacacagtactccacggggcaggtcagcgtggagatcgagtgggagctgcagaaggagaacagcaaacgctggaatcccgaaattcagtacacttccaactacaacaaatctgttaatgtggactttactgtggacactaatggtgtgtattcagagcctcgccccattggcaccagatacctgactcgtaatctgtaa

SEQ ID NO: 237 - protein, 735 aa, Adeno-associated virus
MAADGYLPDWLEDTLSEGIRQWWKLKPGPPPPKPAERHKDDSRGLVLPGYKYLGPFNGLDKGEPVNEADAAALEHDKAYDRQLDSGDNPYLKYNHADAEFQERLKEDTSFGGNLGRAVFQAKKRILEPLGLVEEPVKTAPGKKRPVEHSPAEPDSSSGTGKAGQQPARKRLNFGQTGDADSVPDPRPLGQPPAAPSGLGTNTMASGSGAPMADNNEGADGVGNSSGNWHCDSTWMGDRVITTSTRTWALPTYNNHLYKQISSQSGASNDNHYFGYSTPWGYFDFNRFHCHFSPRDWQRLINNNWGFRPKRLSFKLFNIQVKEVTQNDGTTTIANNLTSTVQVFTDSEYQLPYVLGSAHQGCLPPFPADVFMVPQYGYLTLNNGSQAVGRSSFYCLEYFPSQMLRTGNNFTFSYTFEDVPFHSSYAHSQSLDRLMNPLIDQYLYYLSRTNTPSGTTTMSRLQFSQAGASDIRDQSRNWLPGPCYRQQRVSKTAADNNNSDYSWTGATKYHLNGRDSLVNPGPAMASHKDDEEKYFPQSGVLIFGKQDSGKTNVDIEKVMITDEEEIRTTNPVATEQYGSVSTNLQSGNTQAATSDVNTQGVLPGMVWQDRDVYLQGPIWAKIPHTDGHFHPSPLMGGFGLKHPPPQILIKNTPVPANPSTTFSAAKFASFITQYSTGQVSVEIEWELQKENSKRWNPEIQYTSNYNKSVNVDFTVDTNGVYSEPRPIGTRYLTRNL

SEQ ID NO: 238 - DNA, 2208 bp, Adeno-associated virus
atggctgccgatggttatcttccagattggctcgaggacactctctctgaaggaataagacagtggtggaagctcaaacctggcccaccaccaccaaagcccgcagagcggcataaggacgacagcaggggtcttgtgcttcctgggtacaagtacctcggacccttcaacggactcgacaagggagagccggtcaacgaggcagacgccgcggccctcgagcacgacaaggcctacgaccggcagctcgacagcggagacaacccgtacctcaagtacaaccacgccgacgcggagtttcaggagcgccttaaaggagatacgtcttttgggggcaacctcggacgagcagtcttccaggccaaaaagaggattcttgaacctctgggcctggttgaggaacctgttaagacggctccgggaaaaaagaggccggtagagcactctcctgcggagccagactcctcctcgggaaccggaaaagcgggccagcagcctgcaagaaagagattgaattttggtcagactggagacgcagactcagtacctgacccccagcctctcggacagccaccagcagccccctctggtctgggaactaatacgatggcttcaggcagtggcgcaccaatggcagacaataacgagggcgccgacggagtgggtaattcctcgggaaattggcattgcgattccacatggatgggcggcagagtcatcaccaccagcacccgcacctgggccctgcccacctacaacaaccatctgtacaagcaaatctccagccagtctggagccagcaacgacaaccactactttggctacagcaccccctgggggtattttgacttcaacagattccactgccacttctccccacgtgactggcaaagactcatcaacaacaactggggattccggcccaagagactcagcttcaagctctttaacattcaagtcaaagaggtcacgcagaatgacggtacgacgacgattgccaataaccttaccagcacggttcaggtgtttactgactcggagtaccagctcccgtacgtcctcggctcggcgcatcaaggatgcctcccgccgttcccagcagacgtcttcatggtgccacagtatggatacctcaccctgaacaacggcagtcaggcggtaggacgctcttccttttactgcctggagtactttccttctcagacgcttcgtaccggaaacaactttaccttcagctacacctttgaagacgttcctttccatagcagctacgctcacagccaaagtctggaccgtctcatgaatcctctcatcgaccagtacctgtattacttgagcagaacaaacactccaagcggaaccaccacgatgtccaggcttcagttttctcaggccggagcaagtgacattcgggaccagtctagaaactggcttcctggaccctgttaccgccagcagcgagtatcaaagacagctgcggacaacaacaacagtgattactcgtggactggagctaccaagtaccacctcaatggaagagactctctggtgaatccgggcccagctatggccagccacaaggacgatgaagaaaaatattttcctcagagcggggttctcatctttggaaaacaagactcgggaaaaactaatgtggacattgaaaaggttatgattacagacgaagaggaaatcaggaccaccaatcccgtggctacggagcagtatggttctgtatctaccaacctccagagcggcaacacacaagcagctacctcagatgtcaacacacaaggcgttcttccaggcatggtctggcaggacagagacgtgtacctgcaggggcccatctgggcaaagattccacacacggacggacattttcacccctctcccctcatgggcggattcggacttaaacaccctcctccacaaattctcatcaagaacaccccggtacctgcgaatccttcgaccactttcagtgcggcaaagtttgcttccttcatcacacagtactccacggggcaggtcagcgtggagatcgagtgggagctgcagaaggagaacagcaaacgctggaatcccgaaattcagtacacttccaactacaacaaatctgttaatgtggactttactgtggacactaatggtgtgtattcagagcctcgccccattggcaccagatacctgactcgtaatctgtaa

SEQ ID NO: 239 - protein, 735 aa, Adeno-associated virus
MAADGYLPDWLEDTLSEGIRQWWKLKPGPPPPKPAERHKDDSRGLVLPGYKYLGPFNGLDKGEPVNEADAAALEHDKAYDRQLDSGDNPYLKYNHADAEFQERLKGDTSFGGNLGRAVFQAKKRILEPLGLVEEPVKTAPGKKRPVEHSPAEPDSSSGTGKAGQQPARKRLNFGQTGDADSVPDPQPLGQPPAAPSGLGTNTMASGSGAPMADNNEGADGVGNSSGNWHCDSTWMGGRVITTSTRTWALPTYNNHLYKQISSQSGASNDNHYFGYSTPWGYFDFNRFHCHFSPRDWQRLINNNWGFRPKRLSFKLFNIQVKEVTQNDGTTTIANNLTSTVQVFTDSEYQLPYVLGSAHQGCLPPFPADVFMVPQYGYLTLNNGSQAVGRSSFYCLEYFPSQTLRTGNNFTFSYTFEDVPFHSSYAHSQSLDRLMNPLIDQYLYYLSRTNTPSGTTTMSRLQFSQAGASDIRDQSRNWLPGPCYRQQRVSKTAADNNNSDYSWTGATKYHLNGRDSLVNPGPAMASHKDDEEKYFPQSGVLIFGKQDSGKTNVDIEKVMITDEEEIRTTNPVATEQYGSVSTNLQSGNTQAATSDVNTQGVLPGMVWQDRDVYLQGPIWAKIPHTDGHFHPSPLMGGFGLKHPPPQILIKNTPVPANPSTTFSAAKFASFITQYSTGQVSVEIEWELQKENSKRWNPEIQYTSNYNKSVNVDFTVDTNGVYSEPRPIGTRYLTRNL

SEQ ID NO: 240 - DNA, 2208 bp, Adeno-associated virus
atggctgccgatggttatcttccagattggctcgaggacactctctctgaaggaataagacagtggtggaagctcaaacctggcccaccaccaccaaagcccgcagagcggcataaggacgacagcaggggtcttgtgcttcctgggtacaagtacctcggacccttcaacggactcgacaagggagagccggtcaacgaggcagacgccgcggccctcgagcacgacaaggcctacgaccggcagctcgacagcggagacaacccgtacctcaagtacaaccacgccgacgcggagtttcaggagcgtcttaaagaagatacgtcttttgggggcaacctcggacgagcagtcttccaggccaaaaagaggattcttgaacctctgggcctggttgaggaacctgttaagacggctccgggaaaaaagaggccggtagagcactctcctgcggagccagactcctcctcgggaaccggaaaagcgggccagcagcctgcaagaaagagattgaattttggtcagactggagacgcagactcagtacctgacccccagcctctcggacagccaccagcagccccctctggtctgggaactaatacgatggcttcaggcagtggcgcaccaatggcagacaataacgagggcgccgacggagtgggtaattcctcgggaaattggcattgcgattccacatggatgggcgacagagtcatcaccaccagcacccgcacctgggccctgcccacctgcaacaaccatctgtacaagcaaatctccagccagtctggagccagcaacgacaaccactactttggctacagcaccccctgggggtattttgacttcaacagattccactgccacttctccccacgtgactggcaaagactcatcaacaacaactggggattccggcccaagagactcagcttcaagctctttaacattcaagtcaaagaggtcacgcagaatgacggtacgacgacgattgccaataaccttaccagcacggttcaggtgtttactgactcggagtaccagctcccgtacgtcctcggctcggcgcatcaaggatgcctcccgccgttcccagcagacgtcttcatggtgccacagtatggatacctcaccctgaacaacggcagtcaggcggtaggacgctcttccttttactgcctggagtattttccttctcagatgcttcgtaccggaaacaactttaccttcagctacacctttgaagacgttcctttccatagcagctacgctcacagccaaagtctggaccgtctcatgaatcctctcatcgaccagtacctgtattacttgagcagaacaaacactccaagcggaaccaccacgatgtccaggcttcagttttctcaggccggagcaagtgacattcgggaccagtctagaaactggcttcctggaccctgttaccgccagcagcgagtatcaaagacagctgcggacaacaacaacagtgattactcgtggactggagctaccaagtaccacctcaatggaagagactctctggtgaatccgggcccagctatggccagccacaaggacgatgaagaaaaatattttcctcagagcggggttctcatctttggaaaacaagactcgggaaaaactaatgtggacattgaaaaggttatgattacagacgaagaggaaatcaggaccaccaatcccgtggctacggagcagtatggttctgtatctacctacctccagagcggcaacacacaagcagctacctcagatgtcaacacacaaggcgttcttccaggcatggtctggcaggacagagacgtgtacctgcgggggcccatctgggcaaagattccacacacggacggacattttcacccctctcccctcatgggcggatttggacttaaacaccctcctccacaaattctcatcaagaacaccccggtacctgcgaatccttcgaccactttcagtgcggcaaagtttgcttccttcatcacacagtactccacggggcaggtcagcgtggagatcgagtgggagctgcagaaggagaacagcaaacgctggaatcccgaaattcagtacacttccaactacaacaaatctgttaatgtggactttactgtggacactaatggtgtgtattcagagcctcgccccattggcaccagatacctgactcgtaatctgtaa

SEQ ID NO: 241 - protein, 735 aa, Adeno-associated virus
MAADGYLPDWLEDTLSEGIRQWWKLKPGPPPPKPAERHKDDSRGLVLPGYKYLGPFNGLDKGEPVNEADAAALEHDKAYDRQLDSGDNPYLKYNHADAEFQERLKEDTSFGGNLGRAVFQAKKRILEPLGLVEEPVKTAPGKKRPVEHSPAEPDSSSGTGKAGQQPARKRLNFGQTGDADSVPDPQPLGQPPAAPSGLGTNTMASGSGAPMADNNEGADGVGNSSGNWHCDSTWMGDRVITTSTRTWALPTCNNHLYKQISSQSGASNDNHYFGYSTPWGYFDFNRFHCHFSPRDWQRLINNNWGFRPKRLSFKLFNIQVKEVTQNDGTTTIANNLTSTVQVFTDSEYQLPYVLGSAHQGCLPPFPADVFMVPQYGYLTLNNGSQAVGRSSFYCLEYFPSQMLRTGNNFTFSYTFEDVPFHSSYAHSQSLDRLMNPLIDQYLYYLSRTNTPSGTTTMSRLQFSQAGASDIRDQSRNWLPGPCYRQQRVSKTAADNNNSDYSWTGATKYHLNGRDSLVNPGPAMASHKDDEEKYFPQSGVLIFGKQDSGKTNVDIEKVMITDEEEIRTTNPVATEQYGSVSTYLQSGNTQAATSDVNTQGVLPGMVWQDRDVYLRGPIWAKIPHTDGHFHPSPLMGGFGLKHPPPQILIKNTPVPANPSTTFSAAKFASFITQYSTGQVSVEIEWELQKENSKRWNPEIQYTSNYNKSVNVDFTVDTNGVYSEPRPIGTRYLTRNL

SEQ ID NO: 242 - DNA, 2208 bp, Adeno-associated virus; identical to SEQ ID NO: 236

SEQ ID NO: 243 - protein, 735 aa, Adeno-associated virus; identical to SEQ ID NO: 237

SEQ ID NO: 244 - DNA, 2208 bp, Adeno-associated virus
atggctgccgatggttatcttccagattggctcgaggacactctctctgaaggaataagacagtggtggaagctcaaacctggcccaccaccaccaaagcccgcagagcggcataaggacggcagcaggggtcttgtgcttcctgggtacaagtacctcggacccttcaacggactcgacaagggagagccggtcaacgaggcagacgccgcggccctcgagcacgacaaggcctacgaccggcagctcaacagcggagacaacccgtacctcaagtacaaccacgccgacgcggagtttcaggagcgccttaaagaagatacgtcttttgggggcaacctcggacgagcagtcttccaggcaaaaaagagggttcttgaacctctgggcctggttgaggagcctgttaaaacggctccgggaaaaaagagaccggtagagcactctcctgcggagccagactcctcctcgggaaccggaaaagcgggccagcagcctgcaagaaagagattgaattttggtcagactggagacgcagactccgtacctgacccccagcctctcggacagccaccagcagccccctctggtctgggatctactacaatggctacaggcagtggcgcaccaatggcagacaataacgagggtgccgatggagtgggtaattcctcaggaaattggcattgcgattcccaatggctgggcgacagagtcatcaccacaagcactcgaacctgggccctgcccacctacaacaaccacctctacaagcaaatctccagccaatcaggagcctcaaacgacaaccactattttggctacagcaccccttgggggtattttgacttcaacagattccactgccacttttcaccacgtgactggcaaagactcatcaacaacaactggggattccgacccaagagactcaacttcaagctctttaacattcaagtcaaagaggtcacgcagaatgacggtacgacgacgattgccaataaccttaccagcacggttcaggtgtttactgactcggagtaccagctcccgtacgtcctcggctcggcgcatcaaggatgcctcccgccgttcccagcggacgtcttcatggtcccacagtatggatacctcaccctgaacaacgggagtcaggcggtaggacgctctcccttttactgcctggagtactttccttctcagatgctgcgtactggaaacaactttcagttcagctacacttttgaagacgtgcctttccacagcagctacgctcacagccagagtctggatcggctgatgaatcctctgatcgaccagtacctgtattatctgaacaagacacaaacaaatagtggaactcttcagcagtctcggctactgtttagccaagctggacccaccaacatgtctcttcaagctaaaaactggctgcctggaccttgctacagacagcagcgtctgtcaaagcaggcaaacgacaacaacaacagcaactttccctggactgcagctacaaagtatcatctaaatggccgggactcgttggttaatccaggaccagctatggccagtcacaaggatgacgaagaaaagtttttccccatgcatggaaccctgatatttggtaaacaaggaacaaatgccaacgacgcggatttggaaaatgtcatgattacagatgaagaagaaatcaggaccaccaatcccgtggctacggagcagtacgggactgtgtcaaataatttgcaaaactcaaacactggtccaactactggaactgtcaatcaccaaggagcgttacctggtatggtgtggcaggatcgagatgtgtaccttcagggacccatttgggccaagattcctcacaccgatggacactttcatccttctccactgatgggaggttttggactcaaacacccgcctcctcagattatgatcaaaaacactcccgttccagccaatcctcctacaaacttcagttctgccaagtttgcttctttcatcacacagtattccacggggcaggtcagcgtggagatcgagtgggagctgcagaaggagaacagcaaacgctggaatcccgaaattcagtacacttccaactacaacaaatctgttaatgtggactttactgtggacaataatggcgtgtactcagagcctcgccccattggcaccagatacctgactcgtaatctgtaa

SEQ ID NO: 245 - protein, 735 aa, Adeno-associated virus
MAADGYLPDWLEDTLSEGIRQWWKLKPGPPPPKPAERHKDGSRGLVLPGYKYLGPFNGLDKGEPVNEADAAALEHDKAYDRQLNSGDNPYLKYNHADAEFQERLKEDTSFGGNLGRAVFQAKKRVLEPLGLVEEPVKTAPGKKRPVEHSPAEPDSSSGTGKAGQQPARKRLNFGQTGDADSVPDPQPLGQPPAAPSGLGSTTMATGSGAPMADNNEGADGVGNSSGNWHCDSQWLGDRVITTSTRTWALPTYNNHLYKQISSQSGASNDNHYFGYSTPWGYFDFNRFHCHFSPRDWQRLINNNWGFRPKRLNFKLFNIQVKEVTQNDGTTTIANNLTSTVQVFTDSEYQLPYVLGSAHQGCLPPFPADVFMVPQYGYLTLNNGSQAVGRSPFYCLEYFPSQMLRTGNNFQFSYTFEDVPFHSSYAHSQSLDRLMNPLIDQYLYYLNKTQTNSGTLQQSRLLFSQAGPTNMSLQAKNWLPGPCYRQQRLSKQANDNNNSNFPWTAATKYHLNGRDSLVNPGPAMASHKDDEEKFFPMHGTLIFGKQGTNANDADLENVMITDEEEIRTTNPVATEQYGTVSNNLQNSNTGPTTGTVNHQGALPGMVWQDRDVYLQGPIWAKIPHTDGHFHPSPLMGGFGLKHPPPQIMIKNTPVPANPPTNFSSAKFASFITQYSTGQVSVEIEWELQKENSKRWNPEIQYTSNYNKSVNVDFTVDNNGVYSEPRPIGTRYLTRNL

SEQ ID NO: 246 - DNA, 2208 bp, Adeno-associated virus
atggctgccgatggttatcttccagattggctcgaggacactctctctgaaggaataagacagtggtggaagctcaaacctggcccaccaccaccaaagcccgcagagcggcataaggacgacagcaggggtcttgtgcttcctgggtacaagtacctcggacccttcaacggactcgacaagggagagccggtcaacgaggcagacgccgcggccctcgagcacgacaaggcctacgaccggcagctcgacagcggagacaacccgtacctcaagtacaaccacgccgacgcggagtttcaggagcgtcttaaagaagatacgtcttttgggggcaacctcggacgagcagtcttccaggccaaaaagaggattcttgaacctctgggcctggttgaggaacctgttaagacggctccgggaaaaaagaggccggtagagcactctcctgcggagccagactcctcctcgggaaccggaaaagcgggccagcagcctgcaagaaagagattgaattttggtcagactggagacgcagactcagtacctgacccccagcctctcggacagccaccagcagccccctctggtctgggaactaatacgatggcttcaggcagtggcgcaccaatggcagacaataacgagggcgccgacggagtgggtaattcctcgggaaattggcattgcgattccacatggatgggcgacagagtcatcaccaccagcacccgcacctgggccctgcccacctacaacaaccatctgtacaagcaaatctccagccagtctggagccagcaacgacaaccactactttggctacagcaccccctgggggtattttgacttcaacagattccactgccacttctccccacgtgactggcaaagactcatcaacaacaactggggattccggcccaagagactcagcttcaagctctttaacattcaagtcaaagaggtcacgcagaatgacggtacgacgacgattgccaataaccttaccagcacggttcaggtgtttactgactcggagtaccagctcccgtacgtcctcggctcggcgcatcaaggatgcctcccgccgttcccagcagacgtcttcatggtgccacagtatggatacctcaccctgaacaacggcagtcaggcggtaggacgctcttccttttactgcctggagtactttccttctcagatgcttcgtaccggaaacaactttaccttcagctacacctttgaagacgttcctttccatagcagctacgctcacagccaaagtctggaccgtctcatgaatcctctcatcgaccagtacctgtattacttgagcagaacaaacactccaagcggaaccaccacgatgtccaggcttcagttttctcaggccggagcaagtgacattcgggaccagtctagaaactggcttcctggaccctgttaccgccagcagcgagtatcaaagacagctgcggacaacaacaacagtgattactcgtggactggagctaccaagtaccacctcaatggaagagactctctggtgaatccgggcccagctatggccagccacaaggacgatgaagaaaaatattttcctcagagcggggttctcatctttggaaaacaagactcgggaaaaactaatgtggacattgaaaaggttatgattacagacgaagaggaaatcaggaccaccaatcccgtggctacggagcagtatggttctgtatctaccaacctccagagcggcaacacacaagcagctacctcagatgtcaacacacaaggcgttcttccaggcatggtctggcaggacagagacgtgtacctgcaggggcccatctgggcaaagattccacacacggacggacattttcacccctctcccctcatgggcggattcggacttaaacaccctcctccacaaattctcatcaagaacaccccggtacctgcgaatccttcgaccactttcagtgcggcaaagtttgcttccttcatcacacagtactccacggggcaggtcagcgtggagatcgagtgggagctgcagaaggagaacagcaaacgctggaatcccgaaattcagtacacttccaactacaacaaatctgttaatgtggactttactgtggacactaatggtgtgtattcagagcctcgccccattggcaccagatacctgactcgtaatctgtaa

SEQ ID NO: 247 - protein, 735 aa, Adeno-associated virus
MAADGYLPDWLEDTLSEGIRQWWKLKPGPPPPKPAERHKDDSRGLVLPGYKYLGPFNGLDKGEPVNEADAAALEHDKAYDRQLDSGDNPYLKYNHADAEFQERLKEDTSFGGNLGRAVFQAKKRILEPLGLVEEPVKTAPGKKRPVEHSPAEPDSSSGTGKAGQQPARKRLNFGQTGDADSVPDPQPLGQPPAAPSGLGTNTMASGSGAPMADNNEGADGVGNSSGNWHCDSTWMGDRVITTSTRTWALPTYNNHLYKQISSQSGASNDNHYFGYSTPWGYFDFNRFHCHFSPRDWQRLINNNWGFRPKRLSFKLFNIQVKEVTQNDGTTTIANNLTSTVQVFTDSEYQLPYVLGSAHQGCLPPFPADVFMVPQYGYLTLNNGSQAVGRSSFYCLEYFPSQMLRTGNNFTFSYTFEDVPFHSSYAHSQSLDRLMNPLIDQYLYYLSRTNTPSGTTTMSRLQFSQAGASDIRDQSRNWLPGPCYRQQRVSKTAADNNNSDYSWTGATKYHLNGRDSLVNPGPAMASHKDDEEKYFPQSGVLIFGKQDSGKTNVDIEKVMITDEEEIRTTNPVATEQYGSVSTNLQSGNTQAATSDVNTQGVLPGMVWQDRDVYLQGPIWAKIPHTDGHFHPSPLMGGFGLKHPPPQILIKNTPVPANPSTTFSAAKFASFITQYSTGQVSVEIEWELQKENSKRWNPEIQYTSNYNKSVNVDFTVDTNGVYSEPRPIGTRYLTRNL

SEQ ID NO: 248 - DNA, 2208 bp, Adeno-associated virus
atggctgccgatggttatcttccagattggctcgaggacactctctctgaaggaataagacagtggtggaagctcaaacctggcccaccaccaccaaagcccgcagagcggcataaggacgacagcaggggtcttgtgcttcctgggtacaagtacctcggacccttcaacggactcgacaagggagagccggtcaacgaggcagacgccgcggccctcgagcacgacaaggcctacgaccggcagctcgacagcggagacaacccgtacctcaagtacaaccacgccgacgcggagtttcaggagcgtcttaaagaagatacgtcttttgggggcaacctcggacgagcagtcttccaggccaaaaagaggattcttgaacctctgggcctggttgaggaacctgttaagacggctccgggaaaaaagaggccggtagagcactctcctgcggagccagactcctcctcgggaaccggaaaagcgggccagcagcctgcaagaaagagattgaattttggtcagactggagacgcagactcagtacctgacccccagcctctcggacagccaccagcagccccctctggtctgggaactaatacgatggcttcaggcagtggcgcaccaatggcagacaataacgagggcgccgacggagtgggtaattcctcgggaaattggcattgcgattccacatggatgggcgacagagtcatcaccaccagcacccgcacctgggccctgcccacctacaacaaccatctgtacaagcaaatctccagccagtctggagccagcaacgacaaccactactttggctacagcaccccctgggggtatttcgacttcaacagattccactgccacttctccccacgtgactggcaaagactcatcaacaacaactggggattccggcccaagagactcagcttcaagctctttaacattcaagtcaaagaggtcacgcagaatgacggtacgacgacgattgccaataaccttaccagcacggttcaggtgtttactgactcggggtaccagctcccgtacgtcctcggctcggcgcatcaaggatgccttccgccgttcccagcagacgtcttcatggtgccacagtatggatacctcaccctgaacaacggcagtcaggcggtaggacgctcttccttttactgcctggagtactttccttctcagatgcttcgtaccggaaacaactttaccttcagctacacctttgaagacgttcctttccatagcagctacgctcacggccaaagtctggaccgtctcatgaatcctctcatcgaccagtacctgtattacttgagcagaacaaacactccaagcggaaccaccacgatgtccaggcttcagttttctcaggccggagcaagtgacgttcgggaccagtctagaaactggcttcctggaccctgttaccgccagcagcgagtatcaaagacagctgcggacaacaacaacagtgattactcgtggactggagctaccaagtaccacctcaatggaagagactctctggtgaatccgggcccagctatggccagccacaaggacgatgaagaaaaatattttcctcagagcggggttctcgtctttggaaaacaagactcgggaaaaactaatgtggacattgaaaaggttatgattacagacgaagaggaaatcaggaccaccaatcccgcggctacggagcagtatggttctgtatctaccaacctccagagcggcaacacacaagcagctacctcagatgtcaacacacaaggcgttcttccaggcatggtctggcaggacagagacgtgtacctgcaggggcccatctgggcaaagattccacacacggacggacattttcacccctctcccctcatgggcggattcggacttaaacaccctcctccacaaattctcatcaagaacaccccggtacctgcgaatccttcgaccactttcagtgcggcaaagtttgtttccttcatcacacagtactccacggggcaggtcagcgtggagatcgagtgggagctgcagaaggagaacagcaaacgctggaatcccgaaattcagtacacttccaactacaacaaatctgttaatgtggactttactgtggacactaatggtgtgtattcagagcctcgccccattggcaccagatacctgactcgtaatctgtaa

SEQ ID NO: 249 - protein, 735 aa, Adeno-associated virus
MAADGYLPDWLEDTLSEGIRQWWKLKPGPPPPKPAERHKDDSRGLVLPGYKYLGPFNGLDKGEPVNEADAAALEHDKAYDRQLDSGDNPYLKYNHADAEFQERLKEDTSFGGNLGRAVFQAKKRILEPLGLVEEPVKTAPGKKRPVEHSPAEPDSSSGTGKAGQQPARKRLNFGQTGDADSVPDPQPLGQPPAAPSGLGTNTMASGSGAPMADNNEGADGVGNSSGNWHCDSTWMGDRVITTSTRTWALPTYNNHLYKQISSQSGASNDNHYFGYSTPWGYFDFNRFHCHFSPRDWQRLINNNWGFRPKRLSFKLFNIQVKEVTQNDGTTTIANNLTSTVQVFTDSGYQLPYVLGSAHQGCLPPFPADVFMVPQYGYLTLNNGSQAVGRSSFYCLEYFPSQMLRTGNNFTFSYTFEDVPFHSSYAHGQSLDRLMNPLIDQYLYYLSRTNTPSGTTTMSRLQFSQAGASDVRDQSRNWLPGPCYRQQRVSKTAADNNNSDYSWTGATKYHLNGRDSLVNPGPAMASHKDDEEKYFPQSGVLVFGKQDSGKTNVDIEKVMITDEEEIRTTNPAATEQYGSVSTNLQSGNTQAATSDVNTQGVLPGMVWQDRDVYLQGPIWAKIPHTDGHFHPSPLMGGFGLKHPPPQILIKNTPVPANPSTTFSAAKFVSFITQYSTGQVSVEIEWELQKENSKRWNPEIQYTSNYNKSVNVDFTVDTNGVYSEPRPIGTRYLTRNL

SEQ ID NO: 250 - DNA, 2208 bp, Adeno-associated virus
atggctgccgatggttatcttccagattggctcgaggacactctctctgaaggaataagacagtggtggaaactcaaacctggcccaccaccaccaaagcccgcagagcggcataaggacgacagcaggggtcttgtgcttcctgggtacaagtacctcggacccttcaacggactcgacaagggagagccggtcaacgaggcagacgccgcggccctcgagcacgacaaggcctacgaccggcagctcgacagcggagacaacccgtacctcaagtacaaccacgccgacgcggagtttcaggagcgccttaaagaagatacgtcttttgggggcaacctcggacgagcagtcttccaggcaaaaaagagggttctggaacctctgagcctggttgaggagcctgttaagacggctccgggaaaaaagaggccggtagagcactctcccgcagagccagattcctcctccggaactggaaagtcgggcaaccagcctgcaagaaagagattgaatttcggtcagactggagactcagactccgtacctgacccccagcctctcggacagccaccagcagccccctctggtctgggaactaatacgatggctacaggcagtggcgcaccaatggcagacaataacgagggcgccgacggagtgggtaattcctcgggaaattggcattgcgattccacatggatgggcgacagagtcatcaccaccagcacccgaacctgggccctgcccacctacaacaaccatctgtacaagcaaatatccagccagtctggagccagcaacgacaatcactactttggctacagcaccccctgggggtattttgacttcaacagattccactgccacttttcaccacgtgactggcaaagactcatcaacaacaactggggattccgacccaagagactcaacttcaagctctttaacattcaagtcaaagaggtcacgcagaatgacggtacgacgacgattgccaataaccttaccagcacggttcaggtgtttactgactcggagtaccagctcccgtacgtcctcggctcggcgcatcaaggatgcctcccgccgttcccagcagacgtcttcatggtgccacagtatggatacctcaccctgaacaacgggagtcaggcagtaggacgctcttcattttactgcctagagtactttccttctcagatgctgcgtaccggaaacaactttaccttcagctacacctttgaggacgttcctttccacagcagctacgctcacagccagagtttggaccgtctcatgaatcctctcatcgaccagtacctgtattacttgagcagaacaaacactccaagcggaaccaccacgcagtccaggcttcagttttctcaggccggagcgagtgacattcaggaccagtctaggaactggcttcctggaccctgttaccgtcagcagcgagtatcaaagacatctgcggataacaacaacagtgaatactcgtggactggagctaccaagtaccacctcaatggcagagactctctggtgaatccgggcccggccatggccagccacaaagacgatgaagaaaagttttttcctcagagcggggttcttatctttgggaagcaaggctcagagaaaacaaatgtggatattgaaaaggtcatgattacagacgaagaggaaatcaggaccaccaatcccgtggctacggagcagtatggttctgtatctaccaacctccagagcggcaacacacaagcagctaccgcagatgtcaacacacaaggcgttcttccaggcatggtcgggcaagacagagacgtgtacctgcaggggcctacttgggcaaagattccacacacggacggacattttcacccctctcccctcatgggcggatttggacttaaacaccctcctccacagattctcatcaagaacaccccggtacctgcgaatccttcgaccaccttcagtgcggcaaagtttgcttccttcattacacagtactccacggggcaggtcagcgtggagatcgagtgggagctgcagaaggagaacagcaaacgctggaatcccgagatccagtacacttccaactacaacaagtctgttaatgtggactttactgtggacactaatggcgtgtattcagagcctcgccccattggcaccagatacctgactcgtaatctgtaa

SEQ ID NO: 251 - protein, 735 aa, Adeno-associated virus
MAADGYLPDWLEDTLSEGIRQWWKLKPGPPPPKPAERHKDDSRGLVLPGYKYLGPFNGLDKGEPVNEADAAALEHDKAYDRQLDSGDNPYLKYNHADAEFQERLKEDTSFGGNLGRAVFQAKKRVLEPLSLVEEPVKTAPGKKRPVEHSPAEPDSSSGTGKSGNQPARKRLNFGQTGDSDSVPDPQPLGQPPAAPSGLGTNTMATGSGAPMADNNEGADGVGNSSGNWHCDSTWMGDRVITTSTRTWALPTYNNHLYKQISSQSGASNDNHYFGYSTPWGYFDFNRFHCHFSPRDWQRLINNNWGFRPKRLNFKLFNIQVKEVTQNDGTTTIANNLTSTVQVFTDSEYQLPYVLGSAHQGCLPPFPADVFMVPQYGYLTLNNGSQAVGRSSFYCLEYFPSQMLRTGNNFTFSYTFEDVPFHSSYAHSQSLDRLMNPLIDQYLYYLSRTNTPSGTTTQSRLQFSQAGASDIQDQSRNWLPGPCYRQQRVSKTSADNNNSEYSWTGATKYHLNGRDSLVNPGPAMASHKDDEEKFFPQSGVLIFGKQGSEKTNVDIEKVMITDEEEIRTTNPVATEQYGSVSTNLQSGNTQAATADVNTQGVLPGMVGQDRDVYLQGPTWAKIPHTDGHFHPSPLMGGFGLKHPPPQILIKNTPVPANPSTTFSAAKFASFITQYSTGQVSVEIEWELQKENSKRWNPEIQYTSNYNKSVNVDFTVDTNGVYSEPRPIGTRYLTRNL

SEQ ID NO: 252 - DNA, 2208 bp, Adeno-associated virus
atggctgccgatggttatcttccagattggctcgaggacactctctctgaaggaataagacagtggtggaagctcaaacctggcccaccaccaccaaagcccgcagagcggcataaggacgacagcaggggtcttgtgcttcctgggtacaagtacctcggacccttcaacggactcgacaagggagagccggtcaacgaggcagacgccgcggccctcgagcacgacaaggcctacgaccggcagctcgacagcggagacaacccgtacctcaagtacaaccacgccgacgcagagtttcaggagcgccttaaagaagatacgtcttttgggggcaacctcggacgagcagtcttccaggcaaaaaagagggttctggaacctctgggcctggttgaggagcctgttaagacggctccgggaaaaaagaggccggtagagcactctcctgcagagccagattcctcctccggaactggaaagtcgggcaaccagcctgcaagaaagagattgaatttcggtcagactggagactcagactccgtacctgacccccagcctctcggacagccaccagcagccccctctggtctgggaactaatacgatggctacaggcagtggcgcaccaatggcagacaataacgagggcgccgacggagtgggtaattcctcgggaaattggcattgcgattccacatggatgggcgacagagtcatcaccaccagcacccgaacctgggccctgcccacctacaacaaccatctgtacaagcaaatatccagccagtctggagccagcaacgacaatcactactttggctacagcaccccctgggggtattttgacttcaacagattccactgccacttttcaccacgtgactggcaaagactcatcaacaacaactggggattccgacccaagagactcaacttcaagctctttaacattcaagtcaaagaggtcacgcagaatgacggtacgacgacgattgccaataaccttaccagcacggttcaggtgtttactgactcggagtaccagctcccgtacgtcctcggctcggcgcatcaaggatgcctcccgccgttcccagcagacgtcttcatggtgccacagtatggatacctcaccctgaacaacgggagtcaggcagtaggacgctcttcattttactgcctagggtactttccttctcagatgctgcgtaccggaaacaactttaccttcagctacacctttgaggacgttcctttccacagcagctacgctcacagccagagtttggaccgtctcatgaatcctctcatcgaccagtacctgtattacttgagcagaacaaacactccaagcggaaccaccacgcagtccaggcttcagttttctcaggccggagcgagtgacattcgggaccagtctaggaactggcttcctggaccctgttaccgtcagcagcgagtatcaaagacatctgcggataacaacaacagtgaatactcgtggactggagctaccaagtaccacctcaatggcagagactctctggtgaatccgggcccggccatggccagccacaaagacgatgaagaaaagttttttcctcagagcggggttcttatctttgggaagcaaggcccagagaaaacaaatgtggatattgaaaaggtcatgattacagacgaagaggaaatcaggaccaccaatcccgtggctacggagcagtatggttctgtatctaccaacctccagagcggcaacacacaagcagctaccgcagatgtcaacacacaaggcgttcttccaggcatggtctggcaagacagagacgtgtacctgcaggggcctatttgggcaaagattccacacacggacggacattttcacccctctcccctcatgggcggatttggacttaaacaccctcctccacagattctcatcaagaacaccccggtacctgcgaatccttcgaccaccttcagtgcggcaaagtttgcttccttcattacacagtactccacggggcaggtcagcgtggagatcgagtgggagctgcagaaggagaacagcaaacgctggaatcccgagatccagtacacttccaactacaacaagtctgttaatgtggactttactgtggacactaatggcgtgtattcagagcctcgccccattggcaccagatacctgactcgtaatctgtaa

SEQ ID NO: 253 - protein, 735 aa, Adeno-associated virus
MAADGYLPDWLEDTLSEGIRQWWKLKPGPPPPKPAERHKDDSRGLVLPGYKYLGPFNGLDKGEPVNEADAAALEHDKAYDRQLDSGDNPYLKYNHADAEFQERLKEDTSFGGNLGRAVFQAKKRVLEPLGLVEEPVKTAPGKKRPVEHSPAEPDSSSGTGKSGNQPARKRLNFGQTGDSDSVPDPQPLGQPPAAPSGLGTNTMATGSGAPMADNNEGADGVGNSSGNWHCDSTWMGDRVITTSTRTWALPTYNNHLYKQISSQSGASNDNHYFGYSTPWGYFDFNRFHCHFSPRDWQRLINNNWGFRPKRLNFKLFNIQVKEVTQNDGTTTIANNLTSTVQVFTDSEYQLPYVLGSAHQGCLPPFPADVFMVPQYGYLTLNNGSQAVGRSSFYCLGYFPSQMLRTGNNFTFSYTFEDVPFHSSYAHSQSLDRLMNPLIDQYLYYLSRTNTPSGTTTQSRLQFSQAGASDIRDQSRNWLPGPCYRQQRVSKTSADNNNSEYSWTGATKYHLNGRDSLVNPGPAMASHKDDEEKFFPQSGVLIFGKQGPEKTNVDIEKVMITDEEEIRTTNPVATEQYGSVSTNLQSGNTQAATADVNTQGVLPGMVWQDRDVYLQGPIWAKIPHTDGHFHPSPLMGGFGLKHPPPQILIKNTPVPANPSTTFSAAKFASFITQYSTGQVSVEIEWELQKENSKRWNPEIQYTSNYNKSVNVDFTVDTNGVYSEPRPIGTRYLTRNL

SEQ ID NO: 254 - protein, 735 aa, Adeno-associated virus
MAADGYLPDWLEDTLSEGIRQWWKLKPGPPPPKPAERHKDDSRGLVLPGYKYLGPFNGLDKGEPVNEADAAALEHDKAYDRQLDSGDNPYLKYNHADAEFQERLKEDTSFGGNLGRAVFQAKKRVLEPLGLVEEPVKTAPGKKRPVEHSPAEPDSSSGTGKSGNQPARKRLNFGQTGDSDSVPDPQPLGQPPAAPSGLGTNTMATGSGAPMADNNEGADGVGNSSGNWHCDSTWMGDRVITTSTRTWALPTYNNHLYKQISSQSGASNDNHYFGYSTPWGYFDFNRFHCHFSPRDWQRLINNNWGFRPKRLNFKLFNIQVKEVTQNDGTTTIANNLTSTVQVFTDSEYQLPYVLGSAHQGCLPPFPADVFMVPQYGYLTLNNGSQAVGRSSFYCLEYFPSQMLRTGNNFTFSYTFEDVPFHSSYAHSQSLDRLMNPLIDQYLYYLSRTNTPSGTTTQSRLQFSQAGASDIRDQSRNWLPGPCYRQQRVSKTSADNNNSEYSWTGATKYHLNGRDSLVNPGPAMASHKDDEEKFFPQSGVLIFGKQGPEKTNVDIEKVMITDEEEIRTTNPVATEQYGSVSTNLQSGNTQAATADVNTQGVLPGMVWQDRDVYLQGPIWAKIPHTDGHFHPSPLMGGFGLKHPPPQILIKNTPVPANPSTTFSAAKFASFITQYSTGQVSVEIEWELQKENSKRWNPEIQYTSNYNKSVNVDFTVDTNGVYSEPRPIGTRYLTRNL

SEQ ID NO: 255 - protein, 735 aa, Adeno-associated virus; identical to SEQ ID NO: 254

SEQ ID NO: 256 - DNA, 2211 bp, Adeno-associated virus
atggctgccgatggttatcttccagattggctcgaggacactctctctgaaggaataagacagtggtggaagctcaaacctggcccaccaccaccaaagcccgcagagcggcataaggacgacagcaggggtcttgtgcttcctgggtacaagtacctcggacccttcaacggactcgacaagggggagccggtcaacgaggcagacgccgcggccctcgagcacgacaaggcctacgaccggcagctcgacagcggagacaacccgtacctcaagtacaaccacgccgacgcagagtttcaggagcgccttaaagaagatacgtcttttgggggcaacctcggacgagcagtcttccaggcgaaaaagagggttcttgaacctctgcggcctggtttgaggaaacctgttaagacggctccgggaaaaaagaggccggtagagcactctcctgtggagccagactcctcctcgggaaccggaaaagcgggccagcagcctgcaagaaaaagattaaattttggtcagactggagacgcagactccgtacctgacccccagcctctcggacagccaccagcagccccctctggtctgggatctactacaatggctacaggcagtggcgcaccaatggcagacaataacgagggtgccgatggagtgggtaattcctcaggaaattggcattgcgattcccaatggctggacgacagagtcatcgccaccagcacccgaacctgggccctgcccacatacaacaaccacctctacaagcaaatctccagccaatcaggagcctgcaacgacaaccactactttggctacagcaccccctgggggtattttgacttcaacagattccactgccacttttcaccacgtgactggcaaagactcatcaacagcaactggggattccggcccaaaagactcaacttcaagctctttaatattcaagtcaaagaggtcacgcagaatgacggtacgacgacgattgccaataaccttaccagcacggttcaggtgtttactgactcggagtaccagctcccgtacgtcccgggctcggcgcatcaaggatgcctcccgccgtttccagcggacgtcttcatggtcccacagtatggatacctcaccctgaacaacgggagtcaggcggtaggacgctcttccttttactgcctggagtactttccttctcagatgctgcgtactggaaacaactttcagttcagctacacttttgaagacgtgcctttccacagcagctacgctcactgccagagtctggatcggctgatgaatcctctgatcgaccagtacctgtattatctgaacaagacacaaacaaatagtggaactcttcagcagtctcggctactgtttagccaagctggaccaaccaacatgtctcttcaagctaaaaactggctgcctggaccttgctacagacagcagcgtctgtcaaaacaggcaaacgacaataacaactgcaactttccctggactgcagctacaaagtatcatctaaatggccgggactcgttggttaatccaggaccagctatggccagtcacaaggatgacgaagaaaagtttttccccatgcatggaaccctgatatttggtaaacaaggaacaaatgccaacgacgcggatttggaaaatgtcatgattacagatgaagaagaaatcaggcccaccaatcccgtggctacggagcagtacgggactgtgtcaaataatttgcaaaactcaaacactggtccaactacaggaactgtcaatcaccaaggagcgttacctggtatggtgtggcaggatcgagacgtgtacctgcagggacccatttgggccaagattcctcacaccgatggacactttcatccttctccactgatgggaggttttggactcaaacacccgcctcctcagatcatgatcaaaagcactcccgttccagccaatcctcccacaaacttcagttctgccaagtttgcttcttccatcacacagtattccacgggacaggtcagcgtggagatcgagtgggagctgcagaaggagaacagcaaacgctggaatcccgaaattcagtacacttccaactacaacaagtctgttaatgtggactttactgtggacactaatggtgtgtattcagagcctcgccccattggcaccagatacctgactcgtaatctgtaa

SEQ ID NO: 257 - protein, 736 aa, Adeno-associated virus
MAADGYLPDWLEDTLSEGIRQWWKLKPGPPPPKPAERHKDDSRGLVLPGYKYLGPFNGLDKGEPVNEADAAALEHDKAYDRQLDSGDNPYLKYNHADAEFQERLKEDTSFGGNLGRAVFQAKKRVLEPLRPGLRKPVKTAPGKKRPVEHSPVEPDSSSGTGKAGQQPARKRLNFGQTGDADSVPDPQPLGQPPAAPSGLGSTTMATGSGAPMADNNEGADGVGNSSGNWHCDSQWLDDRVIATSTRTWALPTYNNHLYKQISSQSGACNDNHYFGYSTPWGYFDFNRFHCHFSPRDWQRLINSNWGFRPKRLNFKLFNIQVKEVTQNDGTTTIANNLTSTVQVFTDSEYQLPYVPGSAHQGCLPPFPADVFMVPQYGYLTLNNGSQAVGRSSFYCLEYFPSQMLRTGNNFQFSYTFEDVPFHSSYAHCQSLDRLMNPLIDQYLYYLNKTQTNSGTLQQSRLLFSQAGPTNMSLQAKNWLPGPCYRQQRLSKQANDNNNCNFPWTAATKYHLNGRDSLVNPGPAMASHKDDEEKFFPMHGTLIFGKQGTNANDADLENVMITDEEEIRPTNPVATEQYGTVSNNLQNSNTGPTTGTVNHQGALPGMVWQDRDVYLQGPIWAKIPHTDGHFHPSPLMGGFGLKHPPPQIMIKSTPVPANPPTNFSSAKFASSITQYSTGQVSVEIEWELQKENSKRWNPEIQYTSNYNKSVNVDFTVDTNGVYSEPRPIGTRYLTRNL

SEQ ID NO: 258 - DNA, 2208 bp, Adeno-associated virus
atggctgccgatggttatcttccagattggctcgaggacactctctctgaaggaataagacagtggtggaagctcaaacctggcccaccaccaccaaagcccgcagagcggcataaggacgacagcaggggtcttgtgcttcctgggtacaagtacctcggacccttcaacggactcgacaagggagagccggtcaacgaggcagacgccgcggccctcgagcacgacaaggcctacgaccggcagctcgacagcggagacaacccgtacctcaagtacaaccacgccgacgcggagtttcaggagcgccttaaagaggatacgtcttttgggggcaacctcggacgagcagtcttccaggcaaaaaagagggttctggaacctctgggcctggttgaggagcctgttaagacggctccgggaaaaaagaggccggtagagcactctcctgcagagccagattcctcctccggaactggaaagtcgggcaaccagcctgcaagaaagagattgaatttcggtcagactggagactcagactccgtacctgacccccagcctctcggacagccaccagcagccccctctggtctgggaactaatacgatggctacaggcagtggcgcaccaatggcagacaataacgagggcgccgacggagtgggtaattcctcgggaaattggcattgcgattccacatggatgggcgacagagtcatcaccaccagcacccgaacctgggccctgcccacctacaacaaccatctgtacaagcaaatatccagccagtctggagccagcaacgacaatcactactttggctacagcaccccctgggggtattttgacttcaacagattccactgccacttttcaccacgtgactggcaaagactcatcaacaacaactggggattccgacccaagagactcaacttcaagctctttaacattcaagtcaaagaggtcacgcagaatgacggtacgacgacgattgccaataaccttaccagcacggttcaggtgtttactgactcggagtaccagctcccgtacgtcctcggctcggcgcatcaaggatgcctcccgccgttcccagcagacgtcttcatggtgccacagtatggatacctcaccctgaacaacgggagtcaggcagtaggacgctcttcattttactgcctagagtactttccttctcagatgctgcgtaccggaaacagctttaccttcagctacacctttgaggacgttcctttccacagcagctacgctcacagccagagtttggaccgtctcatgaatcctctcatcgaccagtacctgtattacttgagcagaacaaacactccaagcggaaccaccacgcagtccaggcttcagttttctcaggccggagcgagtgacattcgggaccagtctaggaactggcttcctggaccctgttaccgtcagcagcgagtatcaaagacatctgcggataacaacaacagtgaatactcgtggactggagctaccaagtaccacctcaatggcagagactctctggtgaatccgggcccggccatggccagccacaaagacgatgaagaaaagttctttcctcagagcggggttcttatctttgggaagcaaggctcagagaaaacaaatgtggatattgaaaaggtcatgattacagacgaagaggaaatcaggaccaccaatcccgtggctacggagcagtatggttctgtatctaccaacctccagagcggcaacacacaagcagctaccgcagatgtcaacacacaaggcgttcttccaggcatggtctggcaagacagagacgtgtacctgcaggggcctatttgggcaaagattccacacacggacggacattttcacccctctcccctcatgggcggatttggacttaaacaccctcctccacagattctcatcaagaacaccccggtacctgcgaatccttcgaccaccttcagtgcggcaaagtttgcttccttcattacacagtactccacggggcaggtcagcgtggagatcgagtgggagctgcagaaggagaacagcaaacgctggaatcccgagatccagtacacttccaactacaacaagtctgttaatgtggactttactgtggacactaatggcgtgtattcagagcctcgccccattggcaccagatacctgactcgtaatctgtaa

SEQ ID NO: 259 - protein, 735 aa, Adeno-associated virus
MAADGYLPDWLEDTLSEGIRQWWKLKPGPPPPKPAERHKDDSRGLVLPGYKYLGPFNGLDKGEPVNEADAAALEHDKAYDRQLDSGDNPYLKYNHADAEFQERLKEDTSFGGNLGRAVFQAKKRVLEPLGLVEEPVKTAPGKKRPVEHSPAEPDSSSGTGKSGNQPARKRLNFGQTGDSDSVPDPQPLGQPPAAPSGLGTNTMATGSGAPMADNNEGADGVGNSSGNWHCDSTWMGDRVITTSTRTWALPTYNNHLYKQISSQSGASNDNHYFGYSTPWGYFDFNRFHCHFSPRDWQRLINNNWGFRPKRLNFKLFNIQVKEVTQNDGTTTIANNLTSTVQVFTDSEYQLPYVLGSAHQGCLPPFPADVFMVPQYGYLTLNNGSQAVGRSSFYCLEYFPSQMLRTGNSFTFSYTFEDVPFHSSYAHSQSLDRLMNPLIDQYLYYLSRTNTPSGTTTQSRLQFSQAGASDIRDQSRNWLPGPCYRQQRVSKTSADNNNSEYSWTGATKYHLNGRDSLVNPGPAMASHKDDEEKFFPQSGVLIFGKQGSEKTNVDIEKVMITDEEEIRTTNPVATEQYGSVSTNLQSGNTQAATADVNTQGVLPGMVWQDRDVYLQGPIWAKIPHTDGHFHPSPLMGGFGLKHPPPQILIKNTPVPANPSTTFSAAKFASFITQYSTGQVSVEIEWELQKENSKRWNPEIQYTSNYNKSVNVDFTVDTNGVYSEPRPIGTRYLTRNL

SEQ ID NO: 260 - DNA, 2211 bp, Adeno-associated virus; identical to SEQ ID NO: 150

SEQ ID NO: 261 - protein, 736 aa, Adeno-associated virus
MAADGYLPDWLEDTLSEGIRQWWKLKPGPPPPKPAERHKDDSRGLVLPGYKYLGPGNGLDKGEPVNAADAAALEHDKAYDQQLKAGDNPYLKYNHADAEFQERLKEDTSFGGNLGRAVFQAKKRLLEPLGLVEEAAKTAPGKKRPVEQSPQEPDSSAGIGKSGSQPAKKKLNFGQTGDTESVPDPQPIGEPPAAPSGVGSLTMASGGGAPVADNNEGADGVGSSSGNWHCDSQWLGDRVITTSTRTWALPTYNNHLYKQISNSTSGGSSNDNAYFGYSTPWGYFDFNRFHCHFSPRDWQRLINNNWGFRPKRLNFKLFNIQVKEVTDNNGVKTIANNLTSTVQVFTDSDYQLPYVLGSAHEGCLPPFPADVFMIPQYGYLTLNDGGQAVGRSSFYCLEYFPSQMLRTGNNFQFSYEFENVPFHSSYAHSQSLDRLMNPLIDQYLYYLSKTINGSGQNQQTLKFSVAGPSNMAVQGRNYIPGPSYRQQRVSTTVTQNNNSEFAWPGASSWALNGRNSLMNPGPAMASHKEGEDRFFPLSGSLIFGKQGTGRDNVDADKVMITNEEEIKTTNPVATESYGQVATNHQSAQAQAQTGWVQNQGILPGMVWQDRDVYLQGPIWAKIPHTDGNFHPSPLMGGFGMKHPPPQILIKNTPVPADPPTAFNKDKLNSFITQYSTGQVSVEIEWELQKENSKRWNPEIQYTSNYYKSNNVEFAVSTEGVYSEPRPIGTRYLTRNL

SEQ ID NO: 262 - DNA, 2211 bp, Adeno-associated virus
atggctgccgatggttatcttccagattggctcgaggacactctctctgaaggaataagacagtggtggaagctcaaacctggcccaccaccaccaaagcccgcagagcggcataaggacgacagcaggggtcttgtgcttcctgggtacaagtacctcggacccggcaacggactcgacaagggggagccggtcaacgcagcagacgcggcggccctcgagcacgacaaggcctacgaccagcagctcaaggccggagacaacccgtacctcaagtacaaccacgccgacgccgagttccaggagcggctcaaagaagatacgtcttttgggggcaacctcgggcgagcagtcttccaggccaaaaagaggcttcttgaacctcttggtctggttgaggaagcggctaagacggctcctggaaagaagaggcctgtagagcagtctcctcaggaaccggactcctccgcgggtattggcaaatcgggttcacagcccgctaaaaagaaactcaatttcggtcagactggcgacacagagtcagtccccgaccctcaaccaatcggagaacctcccgcagccccctcaggtgtgggatctcttacaatggcttcaggtggtggcgcaccagtggcagacaataacgaaggtgccgatggagtgggtagttcctcgggaaattggcattgcgattcccaatggctgggggacagagtcatcaccaccagcacccgaacctgggccctgcccacctacaacaatcacctctacaagcaaatctccaacagcacatctggaggatcttcaaatgacaacgcctacttcggctacagcaccccctgggggtattttgacttcaacagattccactgccacttctcaccacgtgactggcagcgactcatcaacaacaactggggattccggcctaagcgactcaacttcaagctcttcaacattcaggtcaaagaggttacggacaacaatggagtcaagaccatcgccaataaccttaccagcacggtccaggtcttcacggactcagactatcagctcccgtacgtgctcgggtcggctcacgagggctgcctcccgccgttcccagcggacgttttcatgattcctcagtacgggtatctgacgcttaatgatgggagccaggccgtgggtcgttcgtccttttactgcctggaatatttcccgtcgcaaatgctaagaacgggtaacaacttccagttcagctacgagtttgagaacgtacctttccatagcagctacgctcacagccaaagcctggaccgactaatgaatccactcatcgaccaatacttgtactatctctcaaagactattaacggttctggacagaatcaacaaacgctaaaattcagcgtggccggacccagcaacatggctgtccagggaagaaactacatacctggacccagctaccgacaacaacgtgtctcaaccactgtgactcaaaacaacaacagcgaatttgcttggcctggagcttcttcttgggctctcaatggacgtaatagcttgatgaatcctggacctgctatggccagccacaaagaaggagaggaccgtttctttcctttgtctggatctttaatttttggcaaacaaggaactggaagagacaacgtggatgcggacaaagtcatgataaccaacgaagaagaaattaaaactactaacccggtagcaacggagtcctatggacaagtggccacaaaccaccagagtgcccaagcacaggcgcagaccggctgggttcaaaaccaaggaatacttccgggtatggtttggcaggacagagatgtgtacctgcaaggacccatttgggccaaaattcctcacacggacggcaactttcacccttctccgctaatgggagggtttggaatgaagcacccgcctcctcagatcctcatcaaaaacacacctgtacctgcggatcctccaacggctttcaataaggacaagctgaactctttcatcacccagtattctactggccaagtcagcgtggagattgagtgggagctgcagaaggaaaacagcaagcgctggaacccggagatccagtacacttccaactattacaagtctaataatgttgaatttgctgttaatactgaaggtgtatatagtgaaccccgccccattggcaccagatacctgactcgtaatctgtaa

SEQ ID NO: 263 - protein, 736 aa, Adeno-associated virus
MAADGYLPDWLEDTLSEGIRQWWKLKPGPPPPKPAERHKDDSRGLVLPGYKYLGPGNGLDKGEPVNAADAAALEHDKAYDQQLKAGDNPYLKYNHADAEFQERLKEDTSFGGNLGRAVFQAKKRLLEPLGLVEEAAKTAPGKKRPVEQSPQEPDSSAGIGKSGSQPAKKKLNFGQTGDTESVPDPQPIGEPPAAPSGVGSLTMASGGGAPVADNNEGADGVGSSSGNWHCDSQWLGDRVITTSTRTWALPTYNNHLYKQISNSTSGGSSNDNAYFGYSTPWGYFDFNRFHCHFSPRDWQRLINNNWGFRPKRLNFKLFNIQVKEVTDNNGVKTIANNLTSTVQVFTDSDYQLPYVLGSAHEGCLPPFPADVFMIPQYGYLTLNDGSQAVGRSSFYCLEYFPSQMLRTGNNFQFSYEFENVPFHSSYAHSQSLDRLMNPLIDQYLYYLSKTINGSGQNQQTLKFSVAGPSNMAVQGRNYIPGPSYRQQRVSTTVTQNNNSEFAWPGASSWALNGRNSLMNPGPAMASHKEGEDRFFPLSGSLIFGKQGTGRDNVDADKVMITNEEEIKTTNPVATESYGQVATNHQSAQAQAQTGWVQNQGILPGMVWQDRDVYLQGPIWAKIPHTDGNFHPSPLMGGFGMKHPPPQILIKNTPVPADPPTAFNKDKLNSFITQYSTGQVSVEIEWELQKENSKRWNPEIQYTSNYYKSNNVEFAVNTEGVYSEPRPIGTRYLTRNL

SEQ ID NO: 264 - DNA, 2208 bp, Adeno-associated virus
atggctgccgatggttatcttccagattggctcgaggacactctctctgaaggaataagacagcggtggaagctcaaacctggcccaccaccaccagagcccgcagagcggcataaggacgacagcaggggtcttgtgcttcctgggtacaagtacctcggacccttcaacggactcgacaagggagagccggtcaacgaggcagacgccgcggccctcgagcacgacaaagcctacgaccggcagctcgacagcggagacaacccgtacctcaagtacaaccacgccgacgcggagtttcaggagcgccttaaagaagatacgtcttttgggggcaacctcggacgagcagtcttccaggcgaaaaagagggtacttgaacctctgggcctggttgaggaacctgttaagacggctccgggaaaaaagaggccggtagagcactctcctgtggagccagactcctcctcgggaaccggaaaggcgggccagcagcctgcaagaaaaagattgaattttggtcagactggagacgcagactcagtacctgacccccagcctctcggacagccaccagcagccccctctggtctgggaactaatacgatggctacaggcagtggcgcaccaatggcagacaataacgagggcgccgacggagtgggtaattcctcgggaaattggcattgcgattccacatggatgggcgacagagtcatcaccaccagcacccgaacctgggccctgcccacctacaacaaccacctctacaaacaaatttccagccaatcaggagcctcgaacgacaatcactactttggctacagcaccccttgggggtattttgacttcaacagattccactgccacttttcaccacgtgactggcaaagactcatcaacaacaactggggattccgacccaagagactcaacttcaagctctttaacattcaagtcaaagaggtcacgcagaatgacggtacgacgacgattgccaataaccttaccggcacggttcaggtgtttactgactcggagtaccagctcccgtacgtcctcggctcggcgcatcaaggatgcctcccgccgttcccagcagacgtcttcatggtgccacagtatggatacctcaccctgaacaacgggagtcaggcagtaggacgctcttcattttactgcctggagtactttccttctcagatgctgcgtaccggaaacaactttaccttcagctacacttttgaggacgttcctttccacagcagctacgctcacagccagagtctgggccgtctcatgaatcctctcatcgaccagtacctgtattacttgagcagaacaaacactccaagtggaaccaccacgcagtcaaggcttcagttttctcaggccggagcgagtgacattcgggaccagtctaggaactggcttcctggaccctgttaccgccagcagcgagtatcaaagacatctgcggataacaacaacagtgaatactcgtggactggagctaccaagtaccacctcaatggcagagactctctggtgaatccgggcccggccatggcaagccacaaggacgatgaagaaaagttttttcctcagagcggggttctcatctttgggaagcaaggctcagagaaaacaaatgtggacattgaaaaggtcatgattacagacgaagaggaaatcaggacaaccaatcccgtggctacggagcagtatggttctgtatctaccaacctccagagaggcaacagacaagcagctaccgcagatgtcaacacacaaggcgttcttccaggcatggtctggcaggacagagatgtgtaccttcaggggcccatctgggcaaagattccacacacggacggacattttcacccctctcccctcatgggtggattcggacttaaacaccctcctccacagattctcatcaagaacaccccggtacctgcgaatccttcgaccaccttcagtgcggcaaagtttgcttccttcatcacacagtactccacgggacaggtcagcgtggagatcgagtgggagctgcagaaggaaaacagcaaacgctggaatcccgaaattcagtacacttccaactacaacaagtctgttaatgtggactttactgtggacactaatggcgtgtattcagagcctcgccccattggcaccagatacctgactcgtaatctgtaa

SEQ ID NO: 265 - protein, 735 aa, Adeno-associated virus
MAADGYLPDWLEDTLSEGIRQRWKLKPGPPPPEPAERHKDDSRGLVLPGYKYLGPFNGLDKGEPVNEADAAALEHDKAYDRQLDSGDNPYLKYNHADAEFQERLKEDTSFGGNLGRAVFQAKKRVLEPLGLVEEPVKTAPGKKRPVEHSPVEPDSSSGTGKAGQQPARKRLNFGQTGDADSVPDPQPLGQPPAAPSGLGTNTMATGSGAPMADNNEGADGVGNSSGNWHCDSTWMGDRVITTSTRTWALPTYNNHLYKQISSQSGASNDNHYFGYSTPWGYFDFNRFHCHFSPRDWQRLINNNWGFRPKRLNFKLFNIQVKEVTQNDGTTTIANNLTGTVQVFTDSEYQLPYVLGSAHQGCLPPFPADVFMVPQYGYLTLNNGSQAVGRSSFYCLEYFPSQMLRTGNNFTFSYTFEDVPFHSSYAHSQSLGRLMNPLIDQYLYYLSRTNTPSGTTTQSRLQFSQAGASDIRDQSRNWLPGPCYRQQRVSKTSADNNNSEYSWTGATKYHLNGRDSLVNPGPAMASHKDDEEKFFPQSGVLIFGKQGSEKTNVDIEKVMITDEEEIRTTNPVATEQYGSVSTNLQRGNRQAATADVNTQGVLPGMVWQDRDVYLQGPIWAKIPHTDGHFHPSPLMGGFGLKHPPPQILIKNTPVPANPSTTFSAAKFASFITQYSTGQVSVEIEWELQKENSKRWNPEIQYTSNYNKSVNVDFTVDTNGVYSEPRPIGTRYLTRNL

SEQ ID NO: 266 - DNA, 2208 bp, Adeno-associated virus
atggctgccgatggttatcttccagattggctcgaggacactctctctgaaggaataagacagcggtggaagctcaaacctggcccaccaccaccagagcccgcagagcggcataaggacgacagcaggggtcttgtgcttcctgggtacaagtacctcggacccttcaacggactcgacaagggagagccggtcaacgaggcagacgccgcggccctcgagcacgacaaagcctacgaccggcagctcgacagcggagacaacccgtacctcaagtacaaccacgccgacgcggagtttcaggagcgccttaaagaagatacgtcctttgggggcaacctcggacgagcagtcttccaggcgaaaaagagggtacttgaacctctgggcctggttgaggaacctgttaagacggctccgggaaaaaagaggccggtagagcactctcctgtggagccagactcctcctcgggaaccggaaaggcgggccagcagcctgcaagaaaaagattgaattttggtcagactggagacgcagactcagtacctgacccccagcctctcggacagccaccagcagccccctctggtctgggaactaatacgatggctacaggcagtggcgcaccaatggcagacaataacgagggcgccgacggagtgggtaattcctcgggaaattggcattgcgattccacatggatgggcgacagagtcatcaccaccagcacccgaacctgggccctgcccacctacaacaaccacctctacaaacaaatttccagccaatcaggagcctcgaacgacaatcactactttggctacagcaccccttgggggtattttgacttcaacagattccactgccacttttcaccacgtgactggcaaagactcatcaacaacaactggggattccgacccaagagactcaacttcaagctctttaacattcaagtcaaagaggtcacgcagaatgacggtacgacgacgattgccaataaccttaccagcacggttcaggtgtttactgactcggagtaccagctcccgtacgtcctcggctcggcgcatcaaggatgcctcccgccgttcccagcagacgtcttcatggtgccacagtatggatacctcaccctgaacaacgagagtcaggcagtaggacgctcttcattttactgcctggagtactttccttctcagatgctgcgtaccggaaacaactttaccttcagctacacttttgaggacgttcctttccacagcagctacgctcacagccagagtctgggccgtctcatgaatcctctcatcgaccagtacctgtattacttgagcagaacaaacactccaagtggaaccaccacgcagtcaaggcttcagttttctcaggccggagcgagtgacattcgggaccagtctaggaactggcttcctggaccctgttaccgccagcagcgagtatcaaagacatctgcggataacaacaacagtgaatactcgtggactggagctaccaagtaccacctcaatggcagagactctctggtgaatccgggcccggccatggcaagccacaaggacgatgaagaaaagttttttcctcagagcggggttctcatctttgggaagcaaggctcagagaaaacaaatgtggacattgaaaaggtcatgattacagacgaagaggaaatcaggacaaccaatcccgtggctacggagcagtatggttctgtatctaccaacctccagagaggcaacagacaagcagctaccgcagatgtcaacacacaaggcgttcttccaggcatggtctggcaggacagagatgtgtaccttcaggggcccatctgggcaaagattccacacacggacggacattttcacccctctcccctcatgggtggattcggacttaaacaccctcctccacagattctcatcaagaacaccccggtacctgcgaatccttcgaccaccttcagtgcggcaaagtttgcttccttcatcacacagtactccacgggacaggtcagcgtggagatcgagtgggagctgcagaaggaaaacagcaaacgctggaatcccgaaattcagtacacttccaactacaacaagtctgttaatgtggactttactgtggacactaatggcgtgtattcagagcctcgccccattggcaccagatacctgactcgtaatctgtaa

SEQ ID NO: 267 - protein, 735 aa, Adeno-associated virus
MAADGYLPDWLEDTLSEGIRQRWKLKPGPPPPEPAERHKDDSRGLVLPGYKYLGPFNGLDKGEPVNEADAAALEHDKAYDRQLDSGDNPYLKYNHADAEFQERLKEDTSFGGNLGRAVFQAKKRVLEPLGLVEEPVKTAPGKKRPVEHSPVEPDSSSGTGKAGQQPARKRLNFGQTGDADSVPDPQPLGQPPAAPSGLGTNTMATGSGAPMADNNEGADGVGNSSGNWHCDSTWMGDRVITTSTRTWALPTYNNHLYKQISSQSGASNDNHYFGYSTPWGYFDFNRFHCHFSPRDWQRLINNNWGFRPKRLNFKLFNIQVKEVTQNDGTTTIANNLTSTVQVFTDSEYQLPYVLGSAHQGCLPPFPADVFMVPQYGYLTLNNESQAVGRSSFYCLEYFPSQMLRTGNNFTFSYTFEDVPFHSSYAHSQSLGRLMNPLIDQYLYYLSRTNTPSGTTTQSRLQFSQAGASDIRDQSRNWLPGPCYRQQRVSKTSADNNNSEYSWTGATKYHLNGRDSLVNPGPAMASHKDDEEKFFPQSGVLIFGKQGSEKTNVDIEKVMITDEEEIRTTNPVATEQYGSVSTNLQRGNRQAATADVNTQGVLPGMVWQDRDVYLQGPIWAKIPHTDGHFHPSPLMGGFGLKHPPPQILIKNTPVPANPSTTFSAAKFASFITQYSTGQVSVEIEWELQKENSKRWNPEIQYTSNYNKSVNVDFTVDTNGVYSEPRPIGTRYLTRNL

SEQ ID NO: 268 - DNA, 2208 bp, Adeno-associated virus
atggctgccgatggttatcttccagattggctcgaggacactctctctgaaggaataagacagcggtggaagctcaaacctggcccaccaccaccagagcccgcagagcggcataaggacgacagcaggggtcttgtgcttcctgggtacaagtacctcggacccttcaacggactcgacaagggagagccggtcaacgaggcagacgccgcggccctcgagcacgacaaagcctacgaccggcagctcgacagcggagacaacccgtacctcaagtacaaccacgccgacgcggagtttcaggagcgccttaaagaagatacgtcttttgggggcaacctcggacgagcagtcttccaggcgaaaaagagggtacttgaacctctgggcctggttgaggaacctgttaagacggctccgggaaaaaagaggccggtagagcactctcctgtggagccagactcctcctcgggaaccggaaaggcgggccagcagcctgcaagaaaaagattgaattttggtcagactggagacgcagactcagtacctgacccccagcctctcggacagccaccagcagccccctctggtctgggaactaatacgatggctacaggcagtggcgcaccaatggcagacaataacgagggcgccgacggagtgggtaattcctcgggaaattggcattgcgattccacatggatgggcgacagagtcatcaccaccagcacccgaacctgggccctgcccacctacaacaaccacctctacaaacaaatttccagccaatcaggagcctcgaacgacaatcactactttggctacagcaccccttgggggtattttgacttcaacagattccactgccacttttcaccacgtgactggcaaagactcatcaacaacaactggggattccgacccaagagactcaacttcaagctctttaacattcaagtcaaagaggtcacgcagaatgacggtacgacgacgattgccaataaccttaccagcacggttcaggtgtttactgactcggagtaccagctcccgtacgtcctcggctcggcgcatcaaggatgcctcccgccgttcccagcagacgtcttcatggtaccacagtatggatacctcaccctgaacaacgggagtcaggcagtaggacgctcttcattttactgcctggagtactttccttctcagatgctgcgtaccggaaacaactttaccttcagctacacttttgaggacgttcctttccacagcagctacgctcacagccagagtctgggccgtctcatgaatcctctcatcgaccagtacctgtattacttgagcagaacaaacactccaagtggaaccaccacgcagtcaaggcttcagttttctcaggccggagcgagtgacattcgggaccagtctaggaactggcttcctggaccctgttaccgccagcagcgagtatcaaagacatctgcggataacaacaacagtgaatactcgtggactggagctaccaagtaccacctcaatggcagagactctctggtgaatccgggcccggccatggcaagccacaaggacgatgaagaaaagttttttcctcagagcggggttctcatctttgggaagcaaggctcagagaaaacaaatgtggacattgaaaaggtcatgattacagacgaagaggaaatcaggacaaccaatcccgtggctacggagcagtatggttctgtatctaccaacctccagagaggcaacagacaagcagctaccgcagatgtcaacacacaaggcgttcttccaggcatggtctggcaggacagagatgtgtaccttcaggggcccatctgggcaaagattccacacacggacggacattttcacccctctcccctcatgggtggattcggacttaaacaccctcctccacagattctcatcaagaacaccccggtacctgcgaatccttcgaccaccttcagtgcggcaaagtttgcttccttcatcacacagtactccacgggacaggtcagcgtggagatcgagtgggagctgcagaaggaaaacagcaaacgctggaatcccgaaattcagtacacttccaactacaacaagtctgttaatgtggactttactgtggacactaatggcgtgtattcagagcctcgccccattggcaccagatacctgactcgtaatctgtaa

SEQ ID NO: 269 - protein, 735 aa, Adeno-associated virus
MAADGYLPDWLEDTLSEGIRQRWKLKPGPPPPEPAERHKDDSRGLVLPGYKYLGPFNGLDKGEPVNEADAAALEHDKAYDRQLDSGDNPYLKYNHADAEFQERLKEDTSFGGNLGRAVFQAKKRVLEPLGLVEEPVKTAPGKKRPVEHSPVEPDSSSGTGKAGQQPARKRLNFGQTGDADSVPDPQPLGQPPAAPSGLGTNTMATGSGAPMADNNEGADGVGNSSGNWHCDSTWMGDRVITTSTRTWALPTYNNHLYKQISSQSGASNDNHYFGYSTPWGYFDFNRFHCHFSPRDWQRLINNNWGFRPKRLNFKLFNIQVKEVTQNDGTTTIANNLTSTVQVFTDSEYQLPYVLGSAHQGCLPPFPADVFMVPQYGYLTLNNGSQAVGRSSFYCLEYFPSQMLRTGNNFTFSYTFEDVPFHSSYAHSQSLGRLMNPLIDQYLYYLSRTNTPSGTTTQSRLQFSQAGASDIRDQSRNWLPGPCYRQQRVSKTSADNNNSEYSWTGATKYHLNGRDSLVNPGPAMASHKDDEEKFFPQSGVLIFGKQGSEKTNVDIEKVMITDEEEIRTTNPVATEQYGSVSTNLQRGNRQAATADVNTQGVLPGMVWQDRDVYLQGPIWAKIPHTDGHFHPSPLMGGFGLKHPPPQILIKNTPVPANPSTTFSAAKFASFITQYSTGQVSVEIEWELQKENSKRWNPEIQYTSNYNKSVNVDFTVDTNGVYSEPRPIGTRYLTRNL

SEQ ID NO: 270 - DNA, 2208 bp, Adeno-associated virus
atggctgccgatggttatcttccagattggctcgaggacactctctctgaaggaataagacagcggtggaagctcaaacctggcccaccaccaccagagcccgcagagcggcataaggacgacagcaggggtcttgtgcttcctgggtacaagtacctcggacccttcaacggactcgacaagggagagccggtcaacgaggcagacgccgcggccctcgagcacgacaaagcctacgaccggcagctcgacagcggagacaacccgtacctcaagtacaaccacgccgacgcggagtttcaggagcgccttaaagaagatacgtcttttgggggcaacctcggacgagcagtcttccaggcgaaaaagagggtactcgaacctctgggcctggttgaggaacctgttaagacggctccgggaaaaaagaggccggtagagcactctcctgtggagccagactcctcctcgggaaccggaaaggcgggccagcagcctgcaagaaaaagattgaattttggtcagactggagacgcagactcagtacctgacccccagcctctcggacagccaccagcagccccctctggtctgggaactaatacgatggctacaggcagtggcgcaccaatggcagacaataacgagggcgccgacggagtgggtaattcctcgggaaattggcattgcgattccacatggatgggcgacagagtcatcaccaccagcacccgaacctgggccctgcccacctacaacaaccacctctacaaacaaatttccagccaatcaggagcctcgaacgacaatcactactttggctacagcaccccttgggggtattttgacttcaacagattccactgccacttttcaccacgtgactggcaaagactcatcaacaacaactggggattccgacccaagagactcaacttcaagctctttaacattcaagtcaaagaggtcacgcagaatgacggtacgacgacgattgccaataaccttaccagcacggttcaggtgtttactgactcggagtaccagctcccgtacgtcctcggctcggcgcatcaaggatgcctcccgccgttcccagcagacgtcttcatggtgccacagtatggatacctcaccctgaacaacgggagtcaggcagcaggacgctcttcattttactgcctggagtactttccttctcagatgctgcgtaccggaaacaactttaccttcagctacacttttgaggacgttcctttccacagcagctacgctcacagccagagtctgggccgtctcatgaatcctctcatcgaccagtacctgtattacttgagcagaacaaacactccaagtggaaccaccacgcagtcaaggcttcagttttctcaggccggagcgagtgacattcgggaccagtctaggaactggcttcctggaccctgttaccgccagcagcgagtatcaaagacatctgcggataacaacaacagtgaatactcgtggactggagctaccaagtaccacctcaatggcagagactctctggtgaatccgggcccggccatggcaagccacaaggacgatgaagaaaagttttttcctcagagcggggttctcatctttgggaagcaaggctcagagaaaacaaatgtggacattgaaaaggtcatgattacagacgaagaggaaatcaggacaaccaatcccgtggctacggagcagtatggttctgtatctaccaacctccagagaggcaacagacaagcagctaccgcagatgtcaacacacaaggcgttcttccaggcatggtctggcaggacagagatgtgtaccttcaggggcccatctgggcaaagattccacacacggacggacattttcacccctctcccctcatgggtggattcggacttaaacaccctcctccacagattctcatcaagaacaccccggtacctgcgaatccttcgaccaccttcagtgcggcaaagtttgcttccttcatcacacagtactccacgggacaggtcagcgtggagatcgagtgggagctgcagaaggaaaacagcaaacgctggaatcccgaaattcagtacacttccaactacaacaagtccgttaatgtggactttactgtggacactaatggcgtgtattcagagcctcgccccattggcaccagatacctgactcgtaatctgtaa

SEQ ID NO: 271 - protein, 735 aa, Adeno-associated virus
MAADGYLPDWLEDTLSEGIRQRWKLKPGPPPPEPAERHKDDSRGLVLPGYKYLGPFNGLDKGEPVNEADAAALEHDKAYDRQLDSGDNPYLKYNHADAEFQERLKEDTSFGGNLGRAVFQAKKRVLEPLGLVEEPVKTAPGKKRPVEHSPVEPDSSSGTGKAGQQPARKRLNFGQTGDADSVPDPQPLGQPPAAPSGLGTNTMATGSGAPMADNNEGADGVGNSSGNWHCDSTWMGDRVITTSTRTWALPTYNNHLYKQISSQSGASNDNHYFGYSTPWGYFDFNRFHCHFSPRDWQRLINNNWGFRPKRLNFKLFNIQVKEVTQNDGTTTIANNLTSTVQVFTDSEYQLPYVLGSAHQGCLPPFPADVFMVPQYGYLTLNNGSQAAGRSSFYCLEYFPSQMLRTGNNFTFSYTFEDVPFHSSYAHSQSLGRLMNPLIDQYLYYLSRTNTPSGTTTQSRLQFSQAGASDIRDQSRNWLPGPCYRQQRVSKTSADNNNSEYSWTGATKYHLNGRDSLVNPGPAMASHKDDEEKFFPQSGVLIFGKQGSEKTNVDIEKVMITDEEEIRTTNPVATEQYGSVSTNLQRGNRQAATADVNTQGVLPGMVWQDRDVYLQGPIWAKIPHTDGHFHPSPLMGGFGLKHPPPQILIKNTPVPANPSTTFSAAKFASFITQYSTGQVSVEIEWELQKENSKRWNPEIQYTSNYNKSVNVDFTVDTNGVYSEPRPIGTRYLTRNL

SEQ ID NO: 272 - protein, 738 aa, Adeno-associated virus; identical to SEQ ID NO: 114

SEQ ID NO: 273 - DNA, 2217 bp, Adeno-associated virus
atggctgctgacggttatcttccagattggctcgaggacaacctctctgagggcattcgcgagtggtgggacctgaaacctggagcccccaagcccaaggccaaccagcagaagcaggacgacggccggggtctggtgcttcctggctacaagtacctcggacccttcaacggactcgacaagggggagcccgtcaacgcggcggacgcagcggccctcgagcacgacaaggcctacgaccagcagctcaaagcgggtgacaatccgtacctgcggtataaccacgccgacgccgagtttcaggagcgtctgcaagaagatacgtcttttgggggcaacctcgggcgagcagtcttccaggccaagaagcgggttctcgaacctctcggtctggttgaggaagctgctaagacggctcctggaaagaagagaccggtagaaccgtcacctcagcgttcccccgactcctccacgggcatcggcaagaaaggccagcagcccgctaaaaagagactgaactttggtcagactggcgactcagagtcagtccccgaccctcaaccaatcggagaaccaccagcaggcccctctggtctgggatctggtacaatggctgcaggcggtggcgctccaatggcagacaataacgaaggcgccgacggagtgggtagttcctcaggaaattggcattgcgattccacatggctgggcgacagagtcatcaccaccagcacccgaacctgggccctgcccacctacaacaaccacctctacaagcaaatatccaatgggacatcgggaggaagcaccaacgacaacacctacttcggctacagcaccccctgggggtattttgacttcaacagattccactgccacttctcaccacgtgactggcagcgactcatcaacaacaactggggattccggccaaaaagactcagcttcaagctcttcaacatccaggtcaaggaggtcacgcagaatgaaggcaccaagaccatcgccaataaccttaccagcacgattcaggtatttacggactcggaataccagctgccgtacgtcctcggctccgcgcaccagggctgcctgcctccgttcccggcggacgtcttcatgattccccagtacggctaccttacactgaacaatggaagtcaagccgtaggccgttcctccttctactgcctggaatattttccatctcaaatgctgcgaactggaaacaattttgaattcagctacaccttcgaggacgtgcctttccacagcagctacgcacacagccagagcttggaccgactgatgaatcctctcatcgaccagtacctgtactacttatccagaactcagtccacaggaggaactcaaggtacccagcaattgttattttctcaagctgggcctgcaaacatgtcggctcaggctaagaactggctacctggaccttgctaccggcagcagcgagtctctacgacactgtcgcaaaacaacaacagcaactttgcttggactggtgccaccaaatatcacctgaacggaagagactctttggtaaatcccggtgtcgccatggcaacccacaaggacgacgaggaacgcttcttcccgtcgagtggagtcctgatgttcggaaaacagggtgctggaagagacaatgtggactacagcagcgttatgctaaccagcgaagaagaaattaaaaccactaaccccgtagccacagaacaatacggtgtggtggctgacaacttgcagcaaaccaatacagggcctattgtgggaaatgtcaacagccaaggagccttacctggcatggtctggcagaaccgagacgtgtacctgcagggtcccatctgggccaagattcctcacacggacggcaacttccacccttcaccgctaatgggaggatttggactgaagcacccacctcctcagatcctgatcaagaacacgccggtacctgcggatcctccaacaacgttcagccaggcgaaattggcttccttcattacgcagtacagcaccggacaggtcagcgtggaaatcgagtgggagctgcagaaggagaacagcaaacgctggaacccagagattcagtacacttcaaactactacaaatctacaaatgtggactttgctgtcaatacagagggaacttattctgagcctcgccccattggtactcgttacctcacccgtaatctgtaa

SEQ ID NO: 274 - protein, 738 aa, Adeno-associated virus
MAADGYLPDWLEDNLSEGIREWWDLKPGAPKPKANQQKQDDGRGLVLPGYKYLGPFNGLDKGEPVNAADAAALEHDKAYDQQLKAGDNPYLRYNHADAEFQERLQEDTSFGGNLGRAVFQAKKRVLEPLGLVEEAAKTAPGKKRPVEPSPQRSPDSSTGIGKKGQQPAKKRLNFGQTGDSESVPDPQPIGEPPAGPSGLGSGTMAAGGGAPMADNNEGADGVGSSSGNWHCDSTWLGDRVITTSTRTWALPTYNNHLYKQISNGTSGGSTNDNTYFGYSTPWGYFDFNRFHCHFSPRDWQRLINNNWGFRPKRLSFKLFNIQVKEVTQNEGTKTIANNLTSTIQVFTDSEYQLPYVLGSAHQGCLPPFPADVFMIPQYGYLTLNNGSQAVGRSSFYCLEYFPSQMLRTGNNFEFSYTFEDVPFHSSYAHSQSLDRLMNPLIDQYLYYLSRTQSTGGTQGTQQLLFSQAGPANMSAQAKNWLPGPCYRQQRVSTTLSQNNNSNFAWTGATKYHLNGRDSLVNPGVAMATHKDDEERFFPSSGVLMFGKQGAGRDNVDYSSVMLTSEEEIKTTNPVATEQYGVVADNLQQTNTGPIVGNVNSQGALPGMVWQNRDVYLQGPIWAKIPHTDGNCHPSPLMGGFGLKHPPPQILIKNTPVPADPPTTFSQAKLASFITQYSTGQVSVEIEWELQKENSKRWNPEIQYTSNYYKSTNVDFAVNTEGTYSEPRPIGTRYLTRNL

SEQ ID NO: 275 - protein, 738 aa, Adeno-associated virus
MAADGYLPDWLEDNLSEGIREWWDLKPGAPKPKANQQKQDDGRGLVLPGYKYLGPFNGLDKGEPVNAADAAALEHDKAYDQQLKAGDNPYLRYNHADAEFQERLQEDTSFGGNLGRAVFQAKKRVLEPLGLVEEGAKTAPGKKRPVEPSPQRSPDSSTGIGKKGQQPARKRLNFGRTGDSESVPDPQPIGEPPAAPSSVGSGTMAAGGGAPMADNNEGADGVGSSSGNWHCDSTWLGDRVITTSTRTWALPTYNNHLYKQISNGTSGGSTNDNTYFGYSTPWGYLDFNRFHCHFSPRDWQRLINNNWGFRPKRLSFKLFNIQVKEVTQNEGTKTIANNLASTIQVFTDSEYQPPYVLGSAHQGCLPPFPADVFMIPQYGYLTLNNGSQAVGRSSFYCLEYFPSQMLRTGNNFSFSYTFEDVPFHSSYAHSQSLDRLMNPLIDQYLYYLSRTQSTGGTAGTQQLLFSRAGPSNMSAQARNWLPGPCYRQQRVSTTLSQNNNSNFAWTGATKYHLNGRDSLVNPGVAMATNKDDEDRFFPSSGILMFGKQGAGKDNVDYSNVMLTSEEEIKTTNPVATEQYGVVADNLQQQNTAPTVGAVNSQGALPGMVWQNRDVYLQGPIWAKIPHTDGNFHPSPLMGGFGLKHPPPQILIKNTPVPADPPTAFNQAKLNSFIAQYSTGQVSVEIEWELQKENSKRWNPEIQYTSNYYKSTNADFAVNTEGVYSEPRPIGTRYLTRNL

SEQ ID NO: 276 - DNA, 2217 bp, Adeno-associated virus
atggctgccgatggttatcttccagattggctcgaggacaacctctctgagggcattcgcgagtggtgggacctgaaacctggagccccgaaacccaaagccaaccagcaaaagcaggacgacggccggggtctggtgcttcctggctacaagtacctcggacccttcaacggactcgacaagggggagcccgtcaacgcggcggacgcagcggccctcgagcacgacaaggcctacgaccagcagctcaaagcgggtgacaatccgtacctgcggtataatcacgccgacgccgagtttcaggagcgtctgcaagaagatacgtcttttgggggcaacctcgggcgagcagtcttccaggccaagaagcgggttctcgaacctctcggtctggttgaggaaggcgctaagacggctcctggaaagaagagaccggtagagccgtcaccacagcgttcccccgactcctccacgggcatcggcaagaaaggccagcagcccgccagaaagagactcaatttcggtcggactggcgactcagagtcagtccccgaccctcaacctatcggagaacctccagcagcgccctctagtgtgggatctggtacaatggctgcaggcggtggcgcaccaatggcagacaataacgaaggtgccgacggagtgggtagttcctcgggaaattggcattgcgattccacatggctgggcgacagagttatcaccaccagcacccgaacctgggccctgcccacctacaacaaccacctctacaagcaaatctccaacgggacctcgggaggcagcaccaacgacaacacctactttggctacagcaccccctgggggtatcttgactttaacagattccactgccacttctcaccacgtgactggcagcgactcatcaacaacaactggggattccggcccaagagactcagcttcaagctcttcaacatccaggtcaaagaggtcacgcagaatgaaggcaccaagaccatcgccaataacctcgccagcaccatccaggtgtttacggactcggaataccagccgccgtacgtcctcggctctgcccaccagggctgcctgcctccgttcccggcggacgtcttcatgattcctcagtacggctacctgactctcaacaacggtagtcaggccgtgggacgttcctccttctactgcctggagtacttcccctctcagatgctgagaacgggcaacaacttttccttcagctacactttcgaggacgtgcctttccacagcagctacgcgcacagccagagtttggacaggctgatgaatcctctcatcgaccagtacctgtactacctgtcaagaacccagtctacgggaggcacagcgggaacccagcagttgctgttttctcgggccgggcctagcaacatgtcggctcaggccagaaactggctgcctggaccctgctacagacagcagcgcgtctccacgacactgtcgcaaaacaacaacagcaactttgcctggactggtgccaccaagtatcatctgaacggcagagactctctggtgaatccgggcgtcgccatggcaaccaacaaggacgacgaggaccgcttcttcccatccagcggcatcctcatgtttggcaagcagggagctggaaaagacaacgtggactatagcaacgtgatgctaaccagcgaggaagaaatcaagaccaccaaccccgtggccacagaacagtatggcgtggtggctgataacctacagcagcaaaacaccgctcctactgtgggggccgtcaacagccagggagccttacctggcatggtctggcagaaccgggacgtgtacctgcagggtcctatttgggccaagattcctcacacagatggcaactttcacccgtctcctttaatgggcggctttggacttaaacatccgcctcctcagatcctcatcaaaaacactcctgttcctgcggatcctccaacagcgttcaaccaggccaagctgaattctttcatcgcgcagtacagcaccggacaagtcagcgtggagatcgagtgggagctgcagaaggagaacagcaagcgctggaacccagagattcagtatacttccaactactacaaatctacaaatgcggactttgctgttaatactgagggtgtttactctgagcctcgccccattggcactcgttacctcacccgtaatctgtaa

SEQ ID NO: 277 - DNA, 2208 bp, Adeno-associated virus
atggctgccgatggttatcttccagattggctcgaggacactctctctgaaggaataagacagtggtggaagctcaaacctggcccaccaccaccaaagcccgcagagcggcataaggacgacagcaggggtcttgtgcttcctgggtacaagtacctcggacccttcaacggactcgacaagggggagccggtcaacgaggcagacgccgcggccctcgagcacgacaaggcctacgaccggcagctcgacagcggagacaacccgtacctcaagtacaaccacgccgacgcagagtttcaggagcgccttaaagaagatacgtcttttgggggcaacctcggacgagcagtcttccaggcgaaaaagagggttcttgaacctctgggcctggttgaggagcctgttaagacggctccgggaaaaaagaggccggtagagcactctcctgtggagccagactcctcctcgggaaccggaaaagcgggccagcagcctgcaagaaaaagattaaattttggtcagactggagacgcagactccgtacctgacccccagcctctcggacagccaccagcagccccctctggtctgggatctactacaatggctacaggcagtggcgcaccaatggcagacaataacgagggtgccgatggagtgggtaattcctcaggaaattggcattgcgattcccaatggctgggcgacagagtcatcaccaccagcacccgaacctgggccctgcccacatacaacaaccacctctacaagcaaatctccagccaatcaggagccagcaacgacaaccactactttggctacagcaccccctgggggtattttgacttcaacagattccactgccacttttcaccacgtgactggcaaagactcgtcaacaacaaccggggattccggcccaaaagactcaacttcaagctctttaatattcaagtcaaagaggtcacgcagaatgacggtacgacgacgattgccaataaccttaccagcacggttcaggtgtttactgactcggagtaccagctcccgtacgtcctgggctcggcgcatcaaggatgcctcccgccgtttccagcggacgtcttcatggtcccacagtatggatacctcaccctgaacaacgggagtcaggcggtaggacgctcttccttttactgcctggagtactttccttctcagatgctgcgtactggaaacaactttcagttcagctacacttttgaagacgtgcctttccacagcagctacgctcacagccagagtctggatcggctgatgaatcctctgatcgaccagtacctgtattatctgaacaagacacaaacaaatagtggaactcttcagcagtctcggctactgtttagccaagctggaccaaccaacatgtctcttcaagctaaaaactggctgcctggaccttgctacagacagcagcgtctgtcaaaacaggcaaacgacaacaacaacagcaactttccctggactgcagctacaaagtatcatctaaatggccgggactcgttggttaatccaggaccagctatggccagtcacaaggatgacgaagaaaagtttttccccatgcatggaaccctgatatttggtaaacaaggaacaaatgccaacgacgcggatttggaaaatgtcatgattacagatgaagaagaaatcagggccaccaatcccgtggctacggagcagtacgggactgtgtcaaataatttgcaaaactcaaacactggtccaactactggaactgtcaatcaccaaggagcgttacctggtatggtgtggcaggatcgagacgtgtacctgcagggacccatttgggccaagattcctcacaccgatggacactttcatccttctccactgatgggaggttttggactcaaacacccgcctcctcagatcatgatcaaaaacactcccgttccagccaatcctcccacaaacttcagttctgccaagtttgcttctttcatcacacagtattccacgggacaggtcagcgtggagatcgagtgggagctgcagaaggagaacagcaaacgctggaatcccgaaattcagtacacttccaactacaacaagtctgttaatgtggactttactgtggacactaatggtgtgtattcagagcctcgccccattggcaccagatacctgactcgtaatctgtaa

SEQ ID NO: 278 - protein, 735 aa, Adeno-associated virus
MAADGYLPDWLEDTLSEGIRQWWKLKPGPPPPKPAERHKDDSRGLVLPGYKYLGPFNGLDKGEPVNEADAAALEHDKAYDRQLDSGDNPYLKYNHADAEFQERLKEDTSFGGNLGRAVFQAKKRVLEPLGLVEEPVKTAPGKKRPVEHSPVEPDSSSGTGKAGQQPARKRLNFGQTGDADSVPDPQPLGQPPAAPSGLGSTTMATGSGAPMADNNEGADGVGNSSGNWHCDSQWLGDRVITTSTRTWALPTYNNHLYKQISSQSGASNDNHYFGYSTPWGYFDFNRFHCHFSPRDWQRLVNNNRGFRPKRLNFKLFNIQVKEVTQNDGTTTIANNLTSTVQVFTDSEYQLPYVLGSAHQGCLPPFPADVFMVPQYGYLTLNNGSQAVGRSSFYCLEYFPSQMLRTGNNFQFSYTFEDVPFHSSYAHSQSLDRLMNPLIDQYLYYLNKTQTNSGTLQQSRLLFSQAGPTNMSLQAKNWLPGPCYRQQRLSKQANDNNNSNFPWTAATKYHLNGRDSLVNPGPAMASHKDDEEKFFPMHGTLIFGKQGTNANDADLENVMITDEEEIRATNPVATEQYGTVSNNLQNSNTGPTTGTVNHQGALPGMVWQDRDVYLQGPIWAKIPHTDGHFHPSPLMGGFGLKHPPPQIMIKNTPVPANPPTNFSSAKFASFITQYSTGQVSVEIEWELQKENSKRWNPEIQYTSNYNKSVNVDFTVDTNGVYSEPRPIGTRYLTRNL

SEQ ID NO: 279 - protein, 738 aa, Adeno-associated virus
MAADGYLPDWLEDNLSEGIREWWDLKPGAPKPKANQQKQDDGRGLVLPGYKYLGPFNGLDKGEPVNAADAAALEHDKAYDQQLKAGDNPYLRYNHADAEFQERLQEDTSFGGNLGRAVFQAKKRVLEPLGLVEEAAKTAPGKKRPVEPSPQRSPDSSTGIGKKGQQPAKKRLSFGQTGDSESVPDPQPIGEPPAGPSGLGSGTMAAGGGAPMADNNEGADGVGSSSGNWHCDSTWLGDRVITTSTRTWALPTYNNHLYKQISNGTSGGSTNDNTYFGYSTPWGYFDFNRFHCHFSPRDWQRLINNNWGFRPKRLSFKLFNIQVKEVTQNEGTKTIANNLTSTIQVFTDSEYQLPYVLGSAHQGCLPPFPADVFMIPQYGYLTLNNGSQAVGRSSFYCLEYFPSQMLRTGNNSEFSYTFEDVPFHSSYAHSQSLDRLMNPLIDQYLYYLSRTQSTGGTQGTQQLLFSQAGPANMSAQAKNWLPGPCYRQQRVSTTLSQNNNSNFAWTGATKYHLNGRDSLVNPGVAMATHKDDEERFFPSSGVLMFGKQGAGRDNVDYSSVMLTSEEEIKTTNPVATEQYGVVADNLQQTNTGPIVGNVNSQGALPGMVWQNRDVYLQGPIWAKIPHTDGNFHPSPLMGGFGLKHPPPQILIKNTPVPADPPTTFSQAKLASFITQYSTGQVSVEIEWELQKENSKRWNPEIQYTSNYYKSTNVDFAVNTEGTYSEPRPIGTRYLTRNL

SEQ ID NO: 280 - DNA, 2217 bp, Adeno-associated virus
atggctgctgacggttatcttccagattggctcgaggacaacctctctgagggcattcgcgagtggtgggacctgaaacctggagcccccaagcccaaggccaaccagcagaagcaggacgacggccggggtctggtgcttcctggctacaagtacctcggacccttcaacggactcgacaagggggagcccgtcaacgcggcggacgcagcggccctcgagcacgacaaggcctacgaccagcagctcaaagcgggtgacaatccgtacctgcggtataaccacgccgacgccgagtttcaggagcgtctgcaagaagatacgtcttttgggggcaacctcgggcgagcagtcttccaggccaagaagcgggttctcgaacctctcggtctggttgaggaagctgctaagacggctcctggaaagaagagaccggtagaaccgtcacctcagcgttcccccgactcctccacgggcatcggcaagaaaggccagcagcccgctaaaaagagactgagctttggtcagactggcgactcagagtcagtccccgaccctcaaccaatcggagaaccaccagcaggcccctctggtctgggatctggtacaatggctgcaggcggtggcgctccaatggcagacaataacgaaggcgccgacggagtgggtagttcctcaggaaattggcattgcgattccacatggctgggcgacagagtcatcaccaccagcacccgaacctgggccctgcccacctacaacaaccacctctacaagcaaatatccaatgggacatcgggaggaagcaccaacgacaacacctacttcggctacagcaccccctgggggtattttgacttcaacagattccactgccacttctcaccacgtgactggcagcgactcatcaacaacaactggggattccggccaaaaagactcagcttcaagctcttcaacatccaggtcaaggaggtcacgcagaatgaaggcaccaagaccatcgccaataaccttaccagcacgattcaggtatttacggactcggaataccagctgccgtacgtcctcggctccgcgcaccagggctgcctgcctccgttcccggcggacgtcttcatgattccccagtacggctaccttacactgaacaatggaagtcaagccgtaggccgttcctccttctactgcctggaatattttccatctcaaatgctgcgaactggaaacaattctgaattcagctacaccttcgaggacgtgcctttccacagcagctacgcacacagccagagcttggaccgactgatgaatcctctcatcgaccagtacctgtactacttatccagaactcagtccacaggaggaactcaaggtacccagcaattgttattttctcaagctgggcctgcaaacatgtcggctcaggctaagaactggctacctggaccttgctaccggcagcagcgagtctctacgacactgtcgcaaaacaacaacagcaactttgcttggactggtgccaccaaatatcacctgaacggaagagactctttggtaaatcccggtgtcgccatggcaacccacaaggacgacgaggaacgcttcttcccgtcgagtggagtcctgatgtttggaaaacagggtgctggaagagacaatgtggactacagcagcgttatgctaaccagcgaagaagaaattaaaaccactaaccctgtagccacagaacaatacggtgtggtggctgacaacttgcagcaaaccaatacagggcctattgtgggaaatgtcaacagccaaggagccttacctggcatggtctggcagaaccgagacgtgtacctgcagggtcccatctgggccaagattcctcacacggacggcaacttccacccttcaccgctaatgggaggatttggactgaagcacccacctcctcagatcctgatcaagaacacgccggtacctgcggatcctccaacaacgttcagccaggcgaaattggcttccttcattacgcagtacagcaccggacaggtcagcgtggaaatcgagtgggagctgcagaaggagaacagcaaacgctggaacccagagattcagtacacttcaaactactacaaatctacaaatgtggactttgctgtcaatacagagggaacttattctgagcctcgccccattggtactcgttacctcacccgtaatctgtaa

SEQ ID NO: 281 - protein, 738 aa, Adeno-associated virus
MAADGYLPDWLEDNLSEGIREWWDLKPGAPKPKANQQKQDDGRGLVLPGYKYLGPFNGLDKGEPVNAADAAALEHDKAYDQQLKAGDNPYLRYNHADAEFQERLQEDTSFGGNLGRAVFQAKKRVLEPLGPVEEAAKTAPGKKRPVEPPPQRSPDSSTGIGKKGQQPAKKRLNFGQTGDSESVPDPQPIGEPPAGPSGLGSGTMAAGGGAPMADNNEGADGVGSSSGNWHCDSTWLGDRVITTSTRTWALPTYNNHLYKQISNGTSGGSTNDNTYFGYSTPWGYFDFNRFHCHFSPRDWQRLINNNWGFRPKRLSFKLFNIQVKEVTQNEGTKTVANNLTSTIQVFTDSEYQLPYVLGSAHQGCLPPFPADVFMIPQYGYLTLNNGSQAVGRSSFYCLEYFPSQMLRTGNNFEFSYTFEDVPFHSSYAHSQSLDRLMNPLIDQYLYYLSRTQSTGGTQGTQQLLFSQAGPANMSAQAKNWLPGPCYRQQRVSTTLSQNNNSNFAWTGATKYHLNGRDSLVNPGVAMATHKDDEERFFPSSGVLMFGKQGAGRDNVDYSSVMLTSEEEIKTTNPVATEQYGVVADNLQQTNTGPIVGNVNSQGALPGMVWQNRDVYLQGPIWAKIPHTDGNFHPSPLMGGFGLKHPPPQILIKNTPVPADPPTTFSQAKLASFITQYSTGQVSVEIEWELQKENSKRWNPEIQYTSNYYKSTNVDFAVNTEGTYSEPRPIGTRYLTRNL

SEQ ID NO: 282 - DNA, 2217 bp, Adeno-associated virus
atggctgctgacggttatcttccagattggctcgaggacaacctctctgagggcattcgcgagtggtgggacctgaaacctggagcccccaagcccaaggccaaccagcagaagcaggacgacggccggggtctggtgcttcctggctacaagtacctcggacccttcaacggactcgacaagggggagcccgtcaacgcggcggacgcagcggccctcgagcacgacaaggcctacgaccagcagctcaaagcgggtgacaatccgtacctgcggtataaccacgccgacgccgagtttcaggagcgtctacaagaagatacgtcttttgggggcaacctcgggcgagcagtcttccaggccaagaagcgggttctcgaacctctcggtccggttgaggaagctgctaagacggctcctggaaagaagagaccggtagaaccgccacctcagcgttcccccgactcctccacgggcatcggcaagaaaggccagcagcccgctaaaaagagactgaactttggtcagactggcgactcagagtcagtccccgaccctcaaccaatcggagaaccaccagcaggcccctctggtctgggatctggtacaatggctgcaggcggtggcgctccaatggcagacaataacgaaggcgccgacggagtgggtagttcctcaggaaattggcattgcgattccacatggctgggcgacagagtcatcaccaccagcacccgaacctgggccctgcccacctacaacaaccacctctacaagcaaatatccaatgggacatcgggaggaagcaccaacgacaacacctacttcggctacagcaccccctgggggtattttgacttcaacagattccactgccacttctcaccacgtgactggcagcgactcatcaacaacaactggggattccggccaaaaagactcagcttcaagctcttcaacatccaggtcaaggaggtcacgcagaatgaaggcaccaagaccgtcgccaataaccttaccagcacgattcaggtatttacggactcggaataccagctgccgtacgtcctcggctccgcgcaccagggctgcctgcctccgttcccggcggacgtcttcatgattccccagtacggctaccttacactgaacaatggaagtcaagccgtaggccgttcctccttctactgcctggaatattttccatctcaaatgctgcgaactggaaacaattttgaattcagctacaccttcgaggacgtgcctttccacagcagctacgcacacagccagagcttggaccgactgatgaatcctctcatcgaccagtacctgtactacttatccagaactcagtccacaggaggaactcaaggtacccagcaattgttattttctcaagctgggcctgcaaacatgtcggctcaggctaagaactggctacctggaccttgctaccggcagcagcgagtctctacgacactgtcgcaaaacaacaacagcaactttgcttggactggtgccaccaaatatcacctgaacggaagagactctttggtaaatcccggtgtcgccatggcaacccacaaggacgacgaggaacgcttcttcccgtcgagtggagtcctgatgtttggaaaacagggtgctggaagagacaatgtggactacagcagcgttatgctaaccagcgaagaagaaattaaaaccactaaccctgtagccacagaacaatacggtgtggtggctgacaacttgcagcaaaccaatacagggcctattgtgggaaatgtcaacagccaaggagccttacctggcatggtctggcagaaccgagacgtgtacctgcagggtcccatctgggccaagattcctcacacggacggcaacttccacccttcaccgctaatgggaggatttggactgaagcacccacctcctcagatcctgatcaagaacacgccggtacctgcggatcctccaacaacgttcagccaggcgaaattggcttccttcattacgcagtacagcaccggacaggtcagcgtggaaatcgagtgggagctgcagaaggagaacagcaaacgttggaacccagagattcagtacacttcaaactactacaaatctacaaatgtggactttgctgtcaatacagagggaacttattctgagcctcgccccattggtactcgttacctcacccgtaatctgtaa

SEQ ID NO: 283 - protein, 738 aa, Adeno-associated virus
MAADGYLPDWLEDNLSEGIREWWDLKPGAPKPKANQQKQDDGRGLVLPGYKYLGPFNGLDKGEPVNAADAAALEHDKAYDQQLKAGDNPYLRYNHADAEFQERLQEDTSFGGNLGRAVFQAKKRVLEPLGLVEEAAKTAPGKKRPVEPSPQRSPDSSTGIGKKGQQPAKKRLNFGQTGDSESVPDPQPIGEPPAGPSGLGSGTMAAGGGAPMADNNEGADGVGSSSGNWHCDSTWLGDRVITTSTRTWALPTYNNHLYKQISNGTSGGSTNDNTYFGYSTPWGYFDFNRFHCHFSPRDWQRLINNNWGFRPKRLSFKLFNIQVKEVTQNEGTKTIANNLTSTIQVFTDSEYQLPYVLGSAHQGCLPPFPADVFMIPQYGYLTLNNGSQAVGRSSFYCLEYFPSQMLRTGNNFEFSYTFEDVPFHSSYAHSQSLDRLMNPLIDQYLYYLSRTQSTGGTQGTQQLLFSQAGPANMSAQAKNWLPGPCYRQQRVSTTLSQSNNSNFAWTGATKYHLNGRDSLVNPGVAMATHKDDEERFFPSSGVLMFGKQGAGRDNVDYSSVMLTSEEEIKTTNPVATEQYGVVADNLQQTNTGPIVGNVNSQGALPGMVWQNRDVYLQGPIWAKIPHTDGNFHPSPLMGGLGLKHPPPQILIKNTPVPADPPTTFSQAKLASFITQYSTGQVSVEIEWELQKENSKRWNPEIQYTSNYYKSTNVDFAVNTEGTYSEPRPIGTRYLTRNL

SEQ ID NO: 284 - DNA, 2217 bp, Adeno-associated virus
atggctgctgacggttatcttccagattggctcgaggacaacctctctgagggcattcgcgagtggtgggacctgaaacctggagcccccaagcccaaggccaaccagcagaagcaggacgacggccggggtctggtgcttcctggctacaagtacctcggacccttcaacggactcgacaagggggagcccgtcaacgcggcggacgcagcggccctcgagcacgacaaggcctacgaccagcagctcaaagcgggtgacaatccgtacctgcggtataaccacgccgacgccgagtttcaggagcgtctgcaagaagatacgtcttttgggggcaacctcgggcgagcagtcttccaggccaagaagcgggttctcgaacctctcggtctggttgaggaagcggctaagacggctcctggaaagaagagaccggtagaaccgtcacctcagcgttcccccgactcctccacgggcatcggcaagaaaggccagcagcccgctaaaaagagactgaactttggtcagactggcgactcagagtcagtccccgaccctcaaccaatcggagaaccaccagcaggcccctctggtctgggatctggtacaatggctgcaggcggtggcgctccaatggcagacaataacgaaggcgccgacggagtgggtagttcctcaggaaattggcattgcgattccacatggctgggcgacagagtcatcaccaccagcacccgaacctgggccctgcccacctacaacaaccacctctacaagcaaatatccaatgggacatcgggaggaagcaccaacgacaacacctacttcggctacagcaccccctgggggtattttgacttcaacagattccactgccacttctcaccacgtgactggcagcgactcatcaacaacaactggggattccggccaaaaagactcagcttcaagctcttcaacatccaggtcaaggaggtcacgcagaatgaaggcaccaagaccatcgccaataaccttaccagcacgattcaggtatttacggactcggaataccagctgccgtacgtcctcggctccgcgcaccagggctgcctgcctccgttcccggcggacgtcttcatgattccccagtacggctaccttacactgaacaatggaagtcaagccgtaggccgttcctccttctactgcctggaatattttccatctcaaatgctgcgaactggaaacaattttgaattcagctacaccttcgaggacgtgcctttccacagcagctacgcacacagccagagcttggaccgactgatgaatcctctcatcgaccagtacctgtactacttatccagaactcagtccacaggaggaactcaaggtacccagcaattgttattttctcaagctgggcctgcaaacatgtcggctcaggctaagaactggctacctggaccttgctaccggcagcagcgagtctctacgacactgtcgcaaagcaacaacagcaactttgcttggactggtgccaccaaatatcacctgaacggaagagactctttggtaaatcccggtgtcgccatggcaacccacaaggacgacgaggaacgcttcttcccgtcgagtggagtcctgatgtttggaaaacagggtgctggaagagacaatgtggactacagcagcgttatgctaaccagcgaagaagaaattaaaaccactaaccctgtagccacagaacaatacggtgtggtggctgacaacttgcagcaaaccaatacagggcctattgtgggaaatgtcaacagccaaggagccttacctggcatggtctggcagaaccgagacgtgtacctgcagggtcccatctgggccaagattcctcacacggacggcaacttccacccttcaccgctaatgggaggacttggactgaagcacccacctcctcagatcctgatcaagaacacgccggtacctgcggatcctccaacaacgttcagccaggcgaaattggcttccttcattacgcagtacagcaccggacaggtcagcgtggaaatcgagtgggagctgcagaaggagaacagcaaacgctggaacccagagattcagtacacttcaaactactacaaatctacaaatgtggactttgctgtcaatacagagggaacttattctgagcctcgccccattggtactcgttacctcacccgtaatctgtaa

SEQ ID NO: 285 - protein, 737 aa, Adeno-associated virus
MAADGYLPDWLEDNLSEGIREWWDLKPGAPKPKANQQKQDDGRGLVLPGYKYLGPFNGLDKGEPVNAADAAALEHDKAYDQQLKAGDNPYPRYNHADAEFQERLQEDTPFGGNLGRAVFQAKKRVLEPLGLVEEAAKTAPGKKRPVEPSPQRSPDSSTGIGKKGQQPAKKRLNFGQTGDSESVPDPQPIGEPPAGPSGLGSGTMAAGGGAPMADNNEGADGVGNASGNWHCDSTWLGDRVITTSTRTWALPTYNNHLYKQISSASTGASNDNHYFGYSTPWGYFDFNRFHCHFSPRDWQRLINNNWGFRPKRLNFKLFNIQVKEVTTNDGVTTIANNLTSTVQVFSDSEYQLPYVLGSAHQGCLPPFPADVFMIPQYGYLTLNNGSQAVGRSSFYCLEYFPSQMLRTGNNFTFSYTFEEVPLHSSYAHSQSLDRLMNPLIVQYLYYLNRTQNQSGSAQNKDLLFSRGSPAGMSVQPKNWLPGPCYRQQRVSKTKTDNNNSNFTWTGASKYNLNGRESIINPGTAMASHKDDEDKFFPMSGVMIFGKESAGASNTALDNVMITDEEEIKATNPVATERFGTVAVNFQSSSTDPATGDVHAMGALPGMVWQDRDVYLQGPIWAKIPHTDGHFHPSPLMGGFGLKNPPPQILIKNTPVPANPPAEFSATKFASFITQYSTGQVSVEIEWELQKENSKRWNPEVQYTSNYAKSASVDFTVDNNGLYTEPRPIGTRYLTRPL

SEQ ID NO: 286 - protein, 737 aa, Adeno-associated virus
MAADGYLPDWLEDNLSEGIREWWDLKPGAPKPKANQQKQDDGRGLVLPGYKYLGPFNGLDKGEPVNAADAAALEHDKAYDQQLKAGDNPYPRYNHADAEFQERLQEDTSFGGNLGRAVFQAKKRVLEPLGLVEEAAKTAPGKKRPVEPSPQRSPDSSTGIGKKGQQPAKKRLNFGQTGDSESVPDPQPIGEPPAGPSGLGSGTMAAGGGAPMADNNEGADGVGNASGNWHCDSTWLGDRVITTSTRTWALPTYNNHLYKQISSASTGASNDNHYFGYSTPWGYFDFNRFHCHFSPRDWQRLINNNWGFRPKRLNFKLFNIQVKEVTTNDGVTTIANNLTSTVQVFSDSEYQLPYVLGSAHQGCLPPFPADVFMIPQYGYLTLNNGSQAVGRSSFYCLEYFPSQMLRTGNNFTFSYTFEEVPLHSSYAHSQSLDRLMNPLIDQYLYYLNRTQNQSGSAQNKDLLFSRGSPAGMSVQPKNWLPGPCYRQQRVSKTKTDNNNSNFTWTGASKYNLNGRESIINPGTAMASHKDDEDKFFPMSGVMIFGKESAGASNTALDNVMITDEEEIKATNPVATERFGTVAVNFQSSSTDPATGDVHAMGALPGMVWQDRDVYLQGPIWAKIPHTDGHFHPSPLMGGFGLKNPPPQILIKNTPVPANPPAEFSATKFASFITQYSTGQVSVEIEWELQKENSKRWNPEVQYTSNYAKSASVDFTVDNNGLYTEPRPIGTRYLTRPL

SEQ ID NO: 287 - DNA, 2214 bp, Adeno-associated virus
atggctgctgacggttatcttccagattggctcgaggacaacctctctgagggcattcgcgagtggtgggacctgaaacctggagcccccaagcccaaggccaaccagcagaagcaggacgacggccggggtctggtgcttcctggctacaagtacctcggacccttcaacggactcgacaagggggagcccgtcaacgcggcggacgcagcggccctcgagcacgacaaggcctacgaccagcagctcaaagcgggtgacaatccgtacccgcggtataaccacgccgacgccgagtttcaggagcgtctgcaagaagatacgccttttgggggcaacctcgggcgagcagtcttccaggccaagaagcgggttctcgaacctctcggtctggttgaggaagctgctaagacggctcctggaaagaagagaccggtagaaccgtcacctcagcgttcccccgactcctccacgggcatcggcaagaaaggccagcagcccgctaaaaagagactgaactttggtcagactggcgactcagagtcagtccccgaccctcaaccaatcggagaaccaccagcaggcccctctggtctgggatctggtacaatggctgcaggcggtggcgctccaatggcagacaataacgaaggcgccgacggagtgggtaatgcctcaggaaattggcattgcgattccacatggctgggcgacagagtcatcaccaccagcacccgcacctgggccttgcccacctacaataaccacctctacaagcaaatctccagtgcttcaacgggggccagcaacgacaaccactacttcggctacagcaccccctgggggtattttgatttcaacagattccactgccacttttcaccacgtgactggcagcgactcatcaacaacaattggggattccggcccaagagactcaacttcaaactcttcaacatccaagtcaaggaggtcacgacgaatgatggcgtcacaaccatcgctaataaccttaccagcacggttcaagtcttctcggactcggagtaccagcttccgtacgtcctcggctctgcgcaccagggctgcctccctccgttcccggcggacgtgttcatgattccgcaatacggctacctgacgctcaacaatggcagccaagccgtgggacgttcatccttttactgcctggaatatttcccttctcagatgctgagaacgggcaacaactttaccttcagctacacctttgaggaagtgcctctccacagcagctacgcgcacagccagagcctggaccggctgatgaatcctctcatcgtccaatacctgtattacctgaacagaactcaaaatcagtccggaagtgcccaaaacaaggacttgctgttcagccgtgggtctccagctggcatgtctgttcagcccaaaaactggctacctggaccctgttatcggcagcagcgcgtttctaaaacaaaaacagacaacaacaacagcaattttacctggactggtgcttcaaaatataacctcaatgggcgtgaatccatcatcaaccctggcactgctatggcctcacacaaagacgacgaagacaagttctttcccatgagcggtgtcatgatttttggaaaagagagcgccggagcttcaaacactgcattggacaatgtcatgattacagacgaagaggaaattaaagccactaaccctgtggccaccgaaagatttgggaccgtggcagtcaatttccagagcagcagcacagaccctgcgaccggagatgtgcatgctatgggagcattacctggcatggtgtggcaagatagagacgtgtacctgcagggtcccatttgggccaaaattcctcacacagatggacactttcacccgtctcctcttatgggcggctttggactcaagaacccgcctcctcagatcctcatcaaaaacacgcctgttcctgcgaatcctccggcggagttttcagctacaaagtttgcttcattcatcacccaatactccacaggacaagtgagtgtggaaattgaatgggagctgcagaaagaaaacagcaagcgctggaatcccgaagtgcagtacacatccaattatgcaaaatctgccagcgttgattttactgtggacaacaatggactttatactgagcctcgccccattggcacccgttaccttacccgtcccctgtaa

SEQ ID NO: 288 - protein, 736 aa, Adeno-associated virus
MAADGYLPDWLEDTLSEGIRQWWKLRPGPPPPKPAERHKDDSRGLVLPGYKYLGPFNGLDKGEPVNEADAAALEHDKAYDRQLDSGDNPYLKYNHADAEFQERLKEDTSFGGNLGRAVFQAKKRVLEPLGLVEEGAETAPGKKRPVEQSPQGPDSSSGIGKTGQQPAKKRLNFGQTGDSESVPDPQPLGEPPATPAAVGPTTMASGGGAPMADNNEGADGVGNASGNWHCDSTWLGDRVITTSTRTWALPTYNNHLYKQISSASTGASNDNHYFGYSTPWGYFDFNRFHCHFSPRDWQRLINNNWGFRPKRLNFKLFNIQVKEVTTNDGVTTIANNLTSTVQVFSDSEYQLPYVLGSAHQGCLPPFPADVFMIPQYGYLTLNNGSQAVGRSSFYCLEYFPSQMLRTGNNFTFSYTFEEVPFHSSYAHSQSLDRLMNPLIDQYLYYPNRTQNQSGSAQNKDLLFSRGSPAGMSVQPKNWLPGPCYRQQRVSKTKTDNNNSNFTWTGASKYNLNGRESIINPGTAMASHKDDEDKFFPMSGVMIFGKESAGASNTALDNVMITDEEEIKATNPVATERFGTVAVNFQSSSTDPATGDVHAMGALPGMVWQGRDVYLQGPIWAKIPHTDGHFHPSPLMGGFGLKNPPPQILIKNTPVPANPPAEFSATKFASFITQYSTGQVSVEIEWELQKENSKRWNPEVQYTSNYAKSANVDFTVDNNGLYTEPRPIGTRYLTRPL

SEQ ID NO: 289 - DNA, 2211 bp, Adeno-associated virus
atggctgccgatggttatcttccagattggctcgaggacactctctctgaaggaataagacagtggtggaagctcagacctggcccaccaccaccaaagcccgcagagcggcataaggacgacagcaggggtcttgtgcttcctgggtacaagtacctcggacccttcaacggactcgacaagggagagccggtcaacgaggcagacgccgcggccctcgagcacgacaaagcctacgaccggcagctcgacagcggagacaacccgtacctcaagtacaaccacgccgacgcggagtttcaggagcgccttaaagaagatacgtcttttgggggcaacctcgggcgagcagtcttccaggccaagaagcgggttctcgaacctctcggtctggttgaggaaggcgctgagacggctcctggaaagaaacgtccggtagagcagtcgccacaagggccagactcctcctcgggcatcggcaagacaggccagcagcccgctaaaaagagactcaattttggtcagactggcgactcagagtcagtccccgatccacaacctctcggagaacctccagcaacccccgctgctgtgggacctactacaatggcttcaggcggtggcgcaccaatggcagacaataacgaaggcgccgacggagtgggtaatgcctcaggaaattggcattgcgattccacatggctgggcgacagagtcatcaccaccagcacccgcacctgggccttgcccacctacaataaccacctctacaagcaaatctccagtgcttcaacgggggccagcaacgacaaccactacttcggctacagcaccccctgggggtattttgatttcaacagattccactgccacttttcaccacgtgactggcagcgactcatcaacaacaattggggattccggcccaagagactcaacttcaaactcttcaacatccaagtcaaggaggtcacgacgaatgatggcgtcacaaccatcgctaataaccttaccagcacggttcaagtcttctcggactcggagtaccagcttccgtacgtcctcggctctgcgcaccagggctgcctccctccgttcccggcggacgtgttcatgattccgcaatacggctacctgacgctcaacaatggcagccaagccgtgggacgttcatccttttactgcctggaatatttcccttctcagatgctgagaacgggcaacaactttaccttcagctacacctttgaggaagtgcctttccacagcagctacgcgcacagccagagcctggaccggctgatgaatcctctcatcgaccaatacctgtattacccgaacagaactcaaaatcagtccggaagtgcccaaaacaaggacttgctgtttagccgtgggtctccagctggcatgtctgttcagcccaaaaactggctacctggaccctgttatcggcagcagcgcgtttctaaaacaaaaacagacaacaacaacagcaattttacctggactggtgcttcaaaatataacctcaatgggcgtgaatccatcatcaaccctggcactgctatggcctcacacaaagacgacgaagacaagttctttcccatgagcggtgtcatgatttttggaaaagagagcgccggagcttcaaacactgcattggacaatgtcatgattacagacgaagaggaaattaaagccactaaccctgtggccaccgaaagatttgggaccgtggcagtcaatttccagagcagcagcacagaccctgcgaccggagatgtgcatgctatgggagcattacctggcatggtgtggcaaggtagagacgtgtacctgcagggtcccatttgggccaaaattcctcacacagatggacactttcacccgtctcctcttatgggcggctttggactcaagaacccgcctcctcagatcctcatcaaaaacacgcctgttcctgcgaatcctccggcggagttttcagctacaaagtttgcttcattcatcacccaatactccacaggacaagtgagtgtggaaattgaatgggagctgcagaaagaaaacagcaagcgctggaatcccgaagtgcagtacacatccaattatgcaaaatctgccaacgttgattttactgtggacaacaatggactttatactgagcctcgccccattggcacccgttaccttacccgtcccctgtaa

SEQ ID NO: 290 - protein, 736 aa, Adeno-associated virus
MAADGYLPDWLEDTLSEGIRQWWKLRPGPPPPKPAERHKDDSRGLVLPGYKYLGPFNGLDKGEPVNEADAAALEHDKAYDRQLDSGDNPYLKYNHADAEFQERLKEDTSFGGNLGRAVFQAKKRVLEPLGLVEEGAKTAPGKKRPVEQSPQGPDSSSGIGKTGQQPAKKRLNFGQTGDSESVPDPQPLGEPPATPAAVGPTTMASGGGAPMADNNEGADGVGNASGNWHCDSTWLGDRVITTSTRTWALPTYNNHLYKQISSASTGASNDNHYFGYSTPWGYFDFNRFHCHFSPRDWQRLINNNWGFRPKRLNFKLFNIQVKEVTTNDGVTTIANNLTSTVQVFSDSEYQLPYVLGSAHQGCLPPFPADVFMIPQYGYLTLNNGSQAVGRSSFYCLEYFPSQMLRTGNNFTFSYTFEEVPFHSSYAHSQSLDRLMNPLIDQYLYYPNRTQNQSGSAQNKDLLFSRGSPAGMSVQPKNWLPGPCYRQQRVSKTKTDNNNSNFTWTGASKYNLNGRESIINPGTAMASHKDDEDKFFPMSGVMIFGKESAGASNTALDNVMITDEEEIKATNPVATERFGTVAVNFQSSSTDPATGDVHAMGALPGMVWQGRDVYLQGPIWAKIPHTDGHFHPSPLMGGFGLKNPPPQILIKNTPVPANPPAEFSATKFASFITQYSTGQVSVEIEWELQKENSKRWNPEVQYTSNYAKSANVDFTVDNNGLYTEPRPIGTRYLTRPL

SEQ ID NO: 291 - protein, 736 aa, Adeno-associated virus
MAADGYLPDWLEDTLSEGIRQWWKLRPGPPPPKPAERHKDDSRGLVLPGYKYLGPFNGLDKGEPVNEADAAALEHDKAYDRQLDSGDNPYLKYNHADAEFQERLKEDTSFGGNLGRAVFQAKKRVLEPLGLVEEGAKTAPGKKRPVEQSPQGPDSSSGIGKTGQQPAKKRLNFGQTGDSESVPDPQPLGEPPATPAAVGPTTMASGGGAPMADNNEGADGVGNASGNWHCDSTWLGDRVITTSTRTWALPTYNNHLYKQISSASTGASNDNHYFGYSTPWGYFDFNRFHCHFSPRDWQRLINNNWGFRPKRLNFKLFNIQVKEVTTNDGVTTIANNLTSTVQVFSDSEYQLPYVLGSAHQGCLPPFPADVFMIPQYGYLTLNNGSQAVGRSSFYCLEYFPSQMLRTGNNFTFSYTFEEVPFHSSYAHSQSLDRLMNPLIDQYLYYLNRTQNQSGSAQNKDLLFSRGSPAGMSVQPKNWLPGPCYRQQRVSKTKTDNNNSNFTWTGASKYNLNGRESIINPGTAMASHKDDEDKFFPMSGVMIFGKESAGASNTALDNVMITDEEEIKATNPVATERFGTVAVNFQSSSTDPATGDVHAMGALPGMVWQGRDVYLQGPIWAKIPHTDGHFHPSPLMGGFGLKNPPPQILIKNTPVPANPPAEFSATKFASFITQYSTGQVSVEIEWELQKENSKRWNPEVQYTSNYAKSANVDFTVDNNGLYTEPRPIGTRYLTRPL

SEQ ID NO: 292 - protein, 736 aa, Adeno-associated virus
MAADGYLPDWLEDTLSEGIRQWWKLRPGPPPPKPAERHKDDSRGLVLPGYKYLGPFNGLDKGEPVNEADAAALEHDKAYDRQLDSGDNPYLKYNHADAEFQERLKEDTSFGGNLGRAVFQAKKRVLEPLGLVEEGAKTAPGKKRPVEQSPQGPDSSSGIGKTGQQPAKKRLNFGQTGDSESVPDPQPLGEPPATPAAVGPTTMASGGGAPMADNNEGADGVGNASGNWHCDSTWLGDRVITTSTRTWALPTYNNHLYKQISSASTGASNDNHYFGYSTPWGYFDFNRFHCHFSPRDWQRLINNNWGFRPKRLNFKLFNIQVKEVTTNDGVTTIANNLTSTVQVFSDSEYQLPYVLGSAHQGCLPPFPADVFMIPQYGYLTLNNGSQAVGRSSFYCLEYFPSQMLRTGNNFTFSYTFEEVPFHSSYAHSQSLDRLMNPLIDQYLYYLNRTQNQSGSAQNKDLLFSRGSPAGMSVQPKNWLPGPCYRQQRVSKTKTDNNNSNFTWTGASKYNLNGRESIINPGTAMASHKDDEDKFFPMSGVMIFGKESAGASNTALDNVMITDEEEIKATNPVATERFGTVAVNFQSSSTDPATGDVHAMGALPGMVWQDRDVYLQGPIWAKIPHTDGHFHPSPLMGGFGLKNPPPQILIKNTPVPANPPAEFSATKFASFITQYSTGQVSVEIEWELQKENSKRWNPEVQYTSNYAKSANVDFTVDNNGLYTEPRPIGTRYLTRPL

SEQ ID NO: 293 - DNA, 2208 bp, Adeno-associated virus
atggctgccgatggctatcttccagattggctcgaggacactctctctgaaggaataagacagtggtggaagctcaaacctggcccaccaccaccaaagcccgcagagcggcatagggacgacagcaggggtcttgtgcttcctgggtacaagtacctcggacccttcaacggactcgacaagggagagccggtcaacgaggcagacgccgcggccctcgagcacgacaaagcctacgaccggcagctcgacagcggagacaacccgtacctcaagtacaaccacgccgacgcggagtttcaggagcgccttaaagaagatacgtcttttgggggcaacctcggacgagcagtcttccaggcgaaaaagagggttcttgaacctctgggcctggttgaggaacctgttaagacggctccgggaaaaaagaggccggtagagcactctcctgtggagccagactcctcctcgggaaccggaaaggcgggccagcagcctgcaagaaaaagattgaattttggtcagactggagacgcagactcagtacctgacccccagcctctcggacagccaccagcagccccctctggtctgggaactaatacgatggctacaggcagtggcgcaccaatggcagacaataacgagggcgccgacggagtgggtaattcctcgggaaattggcattgcgattccacatggatgggcgacagagtcatcaccaccagcacccgaacctgggccctgcccacctacaacaaccacctctacaaacaaatttccagccaatcaggagcctcgaacgacaatcactactttggctacagcaccccttgggggtattttgacttcaacagattccactgccacttttcaccacgtgactggcaaagactcatcaacaacaactggggattccgacccaagagactcaacttcaagctctttaacattcaagtcaaagaggtcacgcagaatgacggtacgacgacgattgccaataaccttaccagcacggttcaggtgtttactgactcggggtaccagctcccgtacgtcctcggctcggcgcatcaaggatgcctcccgccgttcccagcagacgtcttcatggtgccacagtatggataccccaccctgaacaacgggagtcaggcagtaggacgctcttcattttactgcctggagtactttccttctcagatgctgcgtaccggaaacaactttaccttcagctacacttttgaggacgttcctttccacagcagctacgctcacagccagagtctggaccgtctcatgaatcctctcatcgaccagtacctgtattacttgagcacaacaaacactccaagtggaaccaccacgcagtcaaggcttcagttttctcaggccggagcgagtgacattcgggaccagtctaggaactggcttcctggaccctgttaccgccagcagcgagtatcaaagacatctgcggataacaacaacagtgaatactcgtggactggagctaccaagtaccacctcaatggcagagactctctggtgaatccgggcccggccgtggcaagccacaaggacgatgaagaaaagttttttcctcagagcggggttctcatctttgggaagcaaggctcagagaaaacaaatgtggacattgaaaaggtcatgattacagacgaagaggaaatcaggacaaccaatcccgtggctacggagcagtatggttctgtatctaccaacctccagagaggcaacagacaagcagctaccgcagatgtcaacacacaaggcgttcttccaggcatggtctggcaggacagagatgtgtaccttcaggggcccatctgggcaaagattccacacacggacggacattttcacccctctcccctcatgggtggattcggacttaaacaccctcctccacagattctcatcaagaacaccccggtacctgcgaatccttcgaccaccttcagtgcggcaaagtttgcttccttcatcacacagtactccacgggacaggtcagcgtggagatcgagtgggagctgcagaaggaaaacagcaaacgctggaatcccgaaattcagtacacttccaactacaacaagtctgttaatgtggactttactgtggacactaatggcgtgtattcagagcctcgccccattggcaccagatacctgactcgtaatctgtaa

SEQ ID NO: 294 - protein, 735 aa, Adeno-associated virus
MAADGYLPDWLEDTLSEGIRQWWKLKPGPPPPKPAERHRDDSRGLVLPGYKYLGPFNGLDKGEPVNEADAAALEHDKAYDRQLDSGDNPYLKYNHADAEFQERLKEDTSFGGNLGRAVFQAKKRVLEPLGLVEEPVKTAPGKKRPVEHSPVEPDSSSGTGKAGQQPARKRLNFGQTGDADSVPDPQPLGQPPAAPSGLGTNTMATGSGAPMADNNEGADGVGNSSGNWHCDSTWMGDRVITTSTRTWALPTYNNHLYKQISSQSGASNDNHYFGYSTPWGYFDFNRFHCHFSPRDWQRLINNNWGFRPKRLNFKLFNIQVKEVTQNDGTTTIANNLTSTVQVFTDSGYQLPYVLGSAHQGCLPPFPADVFMVPQYGYPTLNNGSQAVGRSSFYCLEYFPSQMLRTGNNFTFSYTFEDVPFHSSYAHSQSLDRLMNPLIDQYLYYLSTTNTPSGTTTQSRLQFSQAGASDIRDQSRNWLPGPCYRQQRVSKTSADNNNSEYSWTGATKYHLNGRDSLVNPGPAVASHKDDEEKFFPQSGVLIFGKQGSEKTNVDIEKVMITDEEEIRTTNPVATEQYGSVSTNLQRGNRQAATADVNTQGVLPGMVWQDRDVYLQGPIWAKIPHTDGHFHPSPLMGGFGLKHPPPQILIKNTPVPANPSTTFSAAKFASFITQYSTGQVSVEIEWELQKENSKRWNPEIQYTSNYNKSVNVDFTVDTNGVYSEPRPIGTRYLTRNL

SEQ ID NO: 295 - DNA, 2211 bp, Adeno-associated virus
atggctgccgacggttatcttccagattggctcgaggacactctctctgaaggaataagacagtggtggaagctcaaacctggcccaccaccaccaaagcccgcagagcggcataaggacgacagcaggggtcttgtgcttcctgggtacaagtacctcggacccttcaacggactcgacaagggagagccggtcaacgaggcagacgccgcggccctcgagcacgacaaagcctacgaccggcagctcgacagcggagacaacccgtacctcaagtacaaccacgccgacgcggagtttcaggagcgccttaaagaagatacgtcttttgggggcaacctcgggcgggcagtcttccaggccaagaagcgggttctcgaacctctcggtctggttgaggaaggcgctaagacggctcctggaaagaaacgtccggtagagcagtcgccacaagagccagactccccctcgggcatcggcaagacaggccagcagcccgctaaaaagagactcaattttggtcagactggcgactcagagtcagtccccgatccacaacctctcggagaacctccagcaacccccgctgctgtgggacctactacaatggcttcaggcggtggcgcaccaatggcagacaataacgaaggcgccgacggagtgggtaatgcctcaggaaattggcactgcgattccacatggctgggcgacagagtcatcaccaccagcacccgcacctgggccttgcccacctacaataaccacctctacaagcaaatctccagtgcttcaacgggggccagcaacgacaaccactacttcggctacagcaccccctgggggtattttgatttcaacagattccactgccacttttcaccacgtgactggcagcgactcatcaacaacaattggggattccggcccaagagactcaacttcaaactcttcaacatccaagtcaaggaggtcacgacgaatgatggcgtcacaaccatcgctaataaccttaccagcacggttcaagtcttctcggactcggagtaccagcttccgtacgtcctcggctctgcgcaccagggccgcctccctccgttcccggcggacgtgttcatgattccgcaatacggctacctgacgctcaacaatggcagccaagccgtgggacgttcatcctcttactgcctggaatatttcccttctcagatgctgagaacgggcaacaactttaccttcagctacacctttgaggaagtgcctctccacagcagctgcgcgcacagccagagcctggaccggctgatgaatcctctcatcgaccaatacctgtattacctgaacagaactcaaaatcagtccggaagtgcccaaaacagggacttgctgttcagccgtgggtctccagctggcatgtctgttcagcccaaaaactggctacctggaccctgttatcggcagcagcgcgtttctaaaacaaaaacagacaacaacaacagcaattttacctggactggtgcttcaaaatataacctcaatgggcgtgaatccatcatcaaccctggcactgctatggcctcacacaaagacgacgaagacaagttctttcccatgagcggtgtcatgatttttggaaaagagagcgccggagcttcaaacactgcattggacaatgtcatgattacagacgaagaggaaattaaagccactaaccctgtggccaccgaaagatttgggaccgtggcagtcaatttccagagcagcagcacagaccctgcgaccggagatgtgcatgctatgggagcattacctggcatggtgtggcaagatagagacgtgtacctgcagggtcccatttgggccaaaattcctcacacagatggacactttcacccgtctcctcttatgggcggctttggactcaagaacccgcctcctcagatcctcatcaaaaacacgcctgttcctgcgaatcctccggcggagttttcagctacaaagtttgcttcattcatcacccaatactccgcaggacaagtgagtgtggaaattgaatgggagctgcagaaagaaaacagcaagcgctggaatcccgaagtgcagtacacatccaattatgcaaaatctgccaacgttgattttactgtggacaacaatggactttatactgagcctcgccccattggcacccgttaccttacccgtcccctgtaa

SEQ ID NO: 296 - protein, 736 aa, Adeno-associated virus
MAADGYLPDWLEDTLSEGIRQWWKLKPGPPPPKPAERHKDDSRGLVLPGYKYLGPFNGLDKGEPVNEADAAALEHDKAYDRQLDSGDNPYLKYNHADAEFQERLKEDTSFGGNLGRAVFQAKKRVLEPLGLVEEGAKTAPGKKRPVEQSPQEPDSPSGIGKTGQQPAKKRLNFGQTGDSESVPDPQPLGEPPATPAAVGPTTMASGGGAPMADNNEGADGVGNASGNWHCDSTWLGDRVITTSTRTWALPTYNNHLYKQISSASTGASNDNHYFGYSTPWGYFDFNRFHCHFSPRDWQRLINNNWGFRPKRLNFKLFNIQVKEVTTNDGVTTIANNLTSTVQVFSDSEYQLPYVLGSAHQGRLPPFPADVFMIPQYGYLTLNNGSQAVGRSSSYCLEYFPSQMLRTGNNFTFSYTFEEVPLHSSCAHSQSLDRLMNPLIDQYLYYLNRTQNQSGSAQNRDLLFSRGSPAGMSVQPKNWLPGPCYRQQRVSKTKTDNNNSNFTWTGASKYNLNGRESIINPGTAMASHKDDEDKFFPMSGVMIFGKESAGASNTALDNVMITDEEEIKATNPVATERFGTVAVNFQSSSTDPATGDVHAMGALPGMVWQDRDVYLQGPIWAKIPHTDGHFHPSPLMGGFGLKNPPPQILIKNTPVPANPPAEFSATKFASFITQYSAGQVSVEIEWELQKENSKRWNPEVQYTSNYAKSANVDFTVDNNGLYTEPRPIGTRYLTRPL

SEQ ID NO: 297 - protein, 736 aa, Adeno-associated virus
MAADGYLPDWLEDTLSEGIRQWWKLKPGPPPPKPAERHKDDSRGLVLPGYKYLGPFNGLDKGEPVNEADAAALEHDKAYDRQLDSGDNPYLKYNHADAEFQERLKEDTSFGGNLGRAVFQAKKRVLEPLGLVEEGAKTAPGKKRPVEQSPQEPDSSSGIGKTGQQPAKKRLNFGQTGDSESVPDPQPLGEPPATPAAVGPTTMASGGGAPMADNNEGADGVGNASGNWHCDSTWLGDRVITTSTRTWALPTYNNHLYKQISSASTGASNDNHYFGYSTPWGYFDFNRFHCHFSPRDWQRLINNNWGFRPKRLNFKLFNIQVKEVTTNDGVTTIANNLTSTVQVFSDSEYQLPYVLGSAHQGCLPPFPADVFMIPQYGYLTLNNGSQAVGRSSFYCLEYFPSQMLRTGNNFTFSYTFEEVPLHSSCAHSQSLDRLMNPLIDQYLYYLNRTQNQSGSAQNRDLLFSRGSPAGMSVQPKNWLPGPCYRQQRVSKTKTDNNNSNFTWTGASKYNLNGRESIINPGTAMASHKDDEDKFFPMSGVMIFGKESAGASNTALDNVMITDEEEIKATNPVATERFGTVAVNFQSSSTDPATGDVHAMGALPGMVWQDRDVYLQGPIWAKIPHTDGHFHPSPLMGGFGLKNPPPQILIKNTPVPANPPAEFSATKFASFITQYSTGQVSVEIEWELQKENSKRWNPEVQYTSNYAKSANVDFTVDNNGLYTEPRPIGTRYLTRPL

SEQ ID NO: 298 - DNA, 2208 bp, Adeno-associated virus
atggctgccgatggctatcttccagattggctcgaggacactctctctgaaggaataagacagtggtggaagctcaaacctggcccaccaccaccaaagcccgcagagcggcatagggacgacagcaggggtcttgtgcttcctgggtacaagtacctcggacccttcaacggactcgacaagggagagccggtcaacgaggcagacgccgcggccctcgagcacgacaaagcctacgaccggcagctcgacagcggagacaacccgtacctcaagtacaaccacgccgacgcggagtttcaggagcgccttaaagaagatacgtcttttgggggcaacctcggacgagcagtcttccaggcgaaaaagagggttcttgaacctctgggcctggttggggaacctgttaagacggctccgggaaaaaagaggccggtagagcactctcctgtggagccagactcctcctcgggaaccggaaaggcgggccagcagcctgcaagaaaaagattgaattttggtcagactggagacgcagactcagtacctgacccccagcctctcggacagccaccagcagccccctctggtctgggaactaatacgatggctacaggcagtggcgcaccaatggcagacaataacgagggcgccgacggagtgggtaattcctcgggaaattggcattgcgattccacatggatgggcgacagagtcatcaccaccagcacccgaacctgggccctgcccacctacaacaaccacctctacaaacaaatttccagccaatcaggagcctcgaacgacagtcactactttggctacagcaccccttgggggtattttgacttcaacagattccactgccacttttcaccacgtgactggcaaagactcatcaacaacaactggggattccgacccaagagactcaacttcaagctctttaacattcaagtcaaagaggtcacgcagaatgacggtacgacgacgattgccaataaccttaccagcacggttcaggtgtttactgactcggagtaccagctcccgtacgtcctcggctcggcgcatcaaggatgcctcccgccgttcccagcagacgtcttcatggtgccacagtatggatacctcaccctgaacaacgggagtcaggcagtaggacgctcttcattttactgcctggagtactttccttctcagatgctgcgtaccggaaacaactttaccttcagctacacttttgaggacgttcctttccacagcagctacgctcacagccagagtctggaccgtctcatgaatcctctcatcgaccagtacctgtattacttgagcacaacaaacactccaagtggaaccaccacgcagtcaaggctccagttttctcaggccggagcgagtgacattcgggaccagtctaggaactggcttcctggaccctgttaccgccagcagcgagtatcaaagacatctgcggataacaacaacagtgaatactcgtggactggagctaccaagtaccacctcaatggcagagactctctggtgaatccgggcccggccatggcaagccacaaggacaatgaagaaaagttttttcctcagagcggggttctcatctttgggaagcaaggctcagagaaaacaaatgtggacattgaaaaggtcatgattacagacgaagaggaaatcaggacaaccaatcccgtggctacggagcagtatggttctgtatctaccaacctccagagaggcaacagacaagcagctaccgcagatgtcaacacacaaggcgttcttccaggcatggtctggcaggacagagatgtgtaccttcaggggcccatctgggcaaagattccacacacggacggacattttcacccctctcccctcatgggtggattcggacttaaacaccctcctccacagattctcatcaagaacaccccggtacctgcgaatccttcgaccaccttcagtgcggcaaagtttgcttccttcatcacacagtactccacgggacaggtcagcgtggagatcgagtgggagctgcagaaggaaaacagcaaacgctggaatcccgaaattcagtacacttccaactacaacaagtctgttaatgtggactttactgtggacactaatggcgtgtattcagagcctcgccccattggcaccagatacctgactcgtaatctgtaa

SEQ ID NO: 299 - protein, 735 aa, Adeno-associated virus
MAADGYLPDWLEDTLSEGIRQWWKLKPGPPPPKPAERHRDDSRGLVLPGYKYLGPFNGLDKGEPVNEADAAALEHDKAYDRQLDSGDNPYLKYNHADAEFQERLKEDTSFGGNLGRAVFQAKKRVLEPLGLVGEPVKTAPGKKRPVEHSPVEPDSSSGTGKAGQQPARKRLNFGQTGDADSVPDPQPLGQPPAAPSGLGTNTMATGSGAPMADNNEGADGVGNSSGNWHCDSTWMGDRVITTSTRTWALPTYNNHLYKQISSQSGASNDSHYFGYSTPWGYFDFNRFHCHFSPRDWQRLINNNWGFRPKRLNFKLFNIQVKEVTQNDGTTTIANNLTSTVQVFTDSEYQLPYVLGSAHQGCLPPFPADVFMVPQYGYLTLNNGSQAVGRSSFYCLEYFPSQMLRTGNNFTFSYTFEDVPFHSSYAHSQSLDRLMNPLIDQYLYYLSTTNTPSGTTTQSRLQFSQAGASDIRDQSRNWLPGPCYRQQRVSKTSADNNNSEYSWTGATKYHLNGRDSLVNPGPAMASHKDNEEKFFPQSGVLIFGKQGSEKTNVDIEKVMITDEEEIRTTNPVATEQYGSVSTNLQRGNRQAATADVNTQGVLPGMVWQDRDVYLQGPIWAKIPHTDGHFHPSPLMGGFGLKHPPPQILIKNTPVPANPSTTFSAAKFASFITQYSTGQVSVEIEWELQKENSKRWNPEIQYTSNYNKSVNVDFTVDTNGVYSEPRPIGTRYLTRNL

SEQ ID NO: 300 - protein, 737 aa, Adeno-associated virus
RMAADGYLPDWLEDNLSEGIREWWDLKPGAPKPKANQQKQDDGRGLVLPGYKYLGPFNGLDKGEPVNAADAAALEHDKAYDQQLKAGDNPYLRYNHADAEFQERLQEDTSFGGNLGRAVFQAKKRVLEPLGLVEEGAKTAPGKKRPVEQSPQEPDSSSGIGKTGQQPAKKRLNFGQTGDSESVPDPQPLGEPPATPAAVGPTTMASGGGAPMADNNEGADGVGNASGNWHCDSTWLGDRVITTSTRTWALPTYNNHLYKQISSTSTGASNDNHYFGYGTPWGYFDFNRFHCHFSPRDWQRLINNNWGFRPKRLNFKLFNIQVEEVTTNDGVTTIANNLTSTVQVFSDSEYQLPYVLGSAHQGCLPPFPADVFMIPQYGYLTLNNGSQAVGRSSFYCLEYFPSQMLRTGNNFTFSYTFEEVPFHSSYAHSQSLDRLMNPLIDQYLYYLNRTQNQSGSAQNKDLLFSRGSPAGMSVQPKNWLPGPCYRQQRVSKTKTDNNNSNFTWTGASKYNLNGRESIINPGTAVASHKDDEDKFFPMSGVMIFGKESAGASSTALDNVMITDEEEIKATNPVATERFGTVAVNFQSSSTDPATGDVHAMGALPGMVWQDRDVYLQGPIWAKIPHTDGHFHPSPLMGGFGLKNPPPQILIKNTPVPANPPAEFSATKFASFITQYSTGQVSVEIEWELQKENSKRWNPEVQYTSNYAKSANVDFTVDNNGLYTEPRPIGTRYLTRPL

SEQ ID NO: 301 - protein, 736 aa, Adeno-associated virus
MAADGYLPDWLEDNLSEGIREWWDLKPGAPKPKANQQKQDDGRGLVLPGYKYLGPFNGLDKGEPVNAADAAALEHDKAYDQQLKAGDNPYLRYNHADAEFQERLQEDTSFGGNLGRAVFQAKKRVLEPLGLVEEGAKTAPGKKRPVEQSPQEPDSSSGIGKTGQQPAKKRLNFGQTGDSESVPDPQPLGEPPATPAAVGPTTMASGGGAPMADNNEGADGVGNASGNWHCDSTWLGDRVITTSTRTWALPTYNNHLYKQISSTSTGASNDNHYFGYGTPWGYFDFNRFHCHFSPRDWQRLINNNWGFRPKRLNFKLFNIQVEEVTTNDGVTTIANNLTSTVQVFSDSEYQLPYVLGSAHQGCLPPFPADVFMIPQYGYLTLNNGSQAVGRSSFYCLEYFPSQMLRTGNNFTFSYTFEEVPFHSSYAHSQSLDRLMNPLIDQYLYYLNRTQNQSGSAQNKDLLFSRGSPAGMSVQPKNWLPGPCYRQQRVSKTKTDNNNSNFTWTGASKYNLNGRESIINPGTAVASHKDDEDKFFPMSGVMIFGKESAGASSTALDNVMITDEEEIKATNPVATERFGTVAVNFQSSSTDPATGDVHAMGALPGMVWQDRDVYLQGPIWAKIPHTDGHFHPSPLMGGFGLKNPPPQILIKNTPVPANPPAEFSATKFASFITQYSTGQVSVEIEWELQKENSKRWNPEVQYTSNYAKSANVDFTVDNNGLYTEPRPIGTRYLTRPL

SEQ ID NO: 302 - DNA, 2211 bp, Adeno-associated virus
atggctgccgatggttatcttccagattggctcgaggacaacctctctgagggcattcgcgagtggtgggacttgaaacctggagccccgaagcccaaagccaaccagcaaaagcaggacgacggccggggtctggtgcttcctggctacaagtacctcggacccttcaacggactcgacaagggggagcccgtcaacgcggcggacgcagcggccctcgagcacgacaaggcctacgaccagcagctcaaagcgggtgacaatccgtacctgcggtataaccacgccgacgccgagtttcaggagcgtctgcaagaagatacgtcttttgggggcaacctcgggcgagcagtcttccaggccaagaagcgggttctcgaacctctcggtctggttgaggaaggcgctaagacggctcctggaaagaaacgtccggtagagcagtcgccacaagagccagactcctcctcgggcatcggcaagacaggccagcagcccgctaaaaagagactcaattttggccagactggcgactcagagtcagtccccgatccacaacctctcggagaacctccagcaacccccgctgctgtgggacctactacaatggcttcaggcggtggcgcaccaatggcagacaataacgaaggcgccgacggagtgggtaatgcctcaggaaattggcattgcgattccacatggctgggcgacagagtcatcaccaccagcacccgcacctgggccttgcccacctacaataaccacctctacaagcaaatctccagtacttcaacgggggccagcaacgacaaccactacttcggctacggcaccccctgggggtattttgatttcaacagattccactgccacttttcaccacgtgactggcagcgactcatcaacaacaattggggattccggcccaagagactcaacttcaaactcttcaacatccaagtcgaggaggtcacgacgaatgatggcgtcacaaccatcgctaataaccttaccagcacggttcaagtcttctcggactcggagtaccagcttccgtacgtcctcggctctgcgcaccagggctgcctccctccgttcccggcggacgtgttcatgattccgcaatacggctacctgacgctcaacaatggcagccaagccgtgggacgttcatccttttactgcctggaatatttcccttctcagatgctgagaacgggcaacaactttaccttcagctacacctttgaggaagtgcctttccacagcagctacgcgcacagccagagcctggaccggctgatgaatcctctcatcgaccaatacctgtattacctgaacagaacacaaaatcagtccggaagtgcccaaaacaaggacttgctgtttagccgtgggtctccagctggcatgtctgttcagcccaaaaactggctacctggaccctgttatcggcagcagcgcgtttctaaaacaaaaacagacaacaacaacagcaattttacctggactggtgcttcaaaatataacctcaatgggcgtgaatccatcatcaaccctggcaccgctgtggcctcacacaaagacgacgaagacaagttctttcccatgagcggtgtcatgatttttggaaaagagagcgccggagcttcaagcactgcattggacaatgtcatgattacagacgaagaggaaattaaagccactaaccctgtggccaccgaaagatttgggaccgtggcagtcaatttccagagcagcagcacagaccctgcgaccggagatgtgcatgctatgggagcattacctggcatggtgtggcaagatagagacgtgtacctgcagggtcccatttgggccaaaattcctcacacagatggacactttcacccgtctcctcttatgggcggctttggactcaagaacccgcctcctcagatcctcatcaaaaacacgcctgttcctgcgaatcctccggcggagttttcagctacaaagtttgcttcattcatcacccaatactccacaggacaagtgagtgtggaaattgaatgggagctgcagaaagaaaacagcaagcgctggaatcccgaagtgcagtacacatccaattatgcaaaatctgccaacgttgattttactgtggacaacaatggactttatactgagcctcgccccattggcacccgttaccttacccgtcccctgtaa

SEQ ID NO: 303 - protein, 737 aa, Adeno-associated virus
RMAADGYLPDWLEDNLSEGIREWWDLKPGAPKPKANQQKQDDGRGLVLPGYKYLGPFNGLDKGEPVNAADAAALEHDKAYDQQLKAGDNPYLRYNHADAEFQERLQEDTSFGGNLGRAVFQAKKRVLEPLGLVEEGAKTAPGKKRPVEQSPQEPDSSSGIGKTGQQPAKKRLNFGQTGDSESVPDPQPLGEPPATPAAVGPTTMASGGGAPMADNNEGADGVGNASGNWHCDSTWLGDRVITTSTRTWALPTYNNHLYKQISSTSTGASNDNHYFGYSTPWGYFDFNRFHCHFSPRDWQRLINNNWGFRPKRLNFKLFNIQVEEVTTNDGVTTIANNLTSTVQVFSDSEYQLPYVLGSAHQGCLPPFPADVFMIPQYGYLTLNNGSQAVGRSSFYCLEYFPSQMLRTGNNFTFSYTFEEVPFHSSYAHSQSLDRLMNPLIDQYLYYLNRTQNQSGSAQNKDLLFSRGSPAGMSVQPKNWLPGPCYRQQRVSKTKTDNNNSNFTWTGASKYNLNGRESIINPGTAVASHKDDEDKFFPMSGVMIFGKESAGASSTALDNVMITDEEEIKATNPVATERFGTVAVNFQSSSTDPATGDVHAMGALPGMVWQDRDVYLQGPIWAKIPHTDGHFHPSPLMGGFGLKNPPPQILIKNTPVPANPPAEFSATKFASFITQYSTGQVSVEIEWELQKENSKRWNPEVQYTSNYAKSANVDFTVDNNGLYTEPRPIGTRYLTRPL

SEQ ID NO: 304 - protein, 737 aa, Adeno-associated virus
RMAADGYLPDWLEDNLSEGIREWWDLKPGAPKPKANQQKQDDGRGLVLPGYKYLGPFNGLDKGEPVNAADAAALEHDKAYDQQLKAGDNPYLRYNHADAEFQERLQEDTSFGGNLGRAVFQAKKRVLEPLGLVEEGAKTAPGKKRPVEQSPQEPDSSSGIGKTGQQPAKKRLNFGQTGDSESVPDPQPLGEPPATPAAVGPTTMASGGGAPMADNNEGADGVGNASGNWHCDSTWLGDRVITTSTRTWALPTYNNHLYKQISSTSTGASNDNHYFGYSTPWGYFDFNRFHCHFSPRDWQRLINNNWGFRPKRLNFKLFNIQVKEVTTNDGVTTIANNLTSTVQVFSDSEYQLPYVLGSAHQGCLPPFPADVFMIPQYGYLTLNNGSQAVGRSSFYCLEYFPSQMLRTGNNFTFSYTFEEVPFHSSYAHSQSLDRLMNPLIDQYLYYLNRTQNQSGSAQNKDLLFSRGSPAGMSVQPKNWLPGPCYRQQRVSKTKTDNNNSNFTWTGASKYNLNGRESIINPGTAVASHKDDEDKFFPMSGVMIFGKESAGASSTALDNVMITDEEEIKATNPVATERFGTVAVNFQSSSTDPATGDVHAMGALPGMVWQDRDVYLQGPIWAKIPHTDGHFHPSPLMGGFGLKNPPPQILIKNTPVPANPPAEFSATKFASFITQYSTGQVSVEIEWELQKENSKRWNPEVQYTSNYAKSANVDFTVDNNGLYTEPRPIGTRYLTRPL

SEQ ID NO: 305 - protein, 737 aa, Adeno-associated virus
RMAADGYLPDWLEDNLSEGIREWWDLKPGAPKPKANQQKQDDGRGLVLPGYKYLGPFNGLDKGEPVNAADAAALEHDKAYDQQLKAGDNPYLRYNHADAEFQERLQEDTSFGGNLGRAVFQAKKRVLEPLGLVEEGAKTAPGKKRPVEQSPQEPDSSSGIGKTGQQPAKKRLNFGQTGDSESVPDPQPLGEPPATPAAVGPTTMASGGGAPMADNNEGADGVGNASGNWHCDSTWLGDRVITTSTRTWALPTYNNHLYKQISSTSTGASNDNHYFGYSTPWGYFDFNRFHCHFSPRDWQRLINNNWGFRPKRLNFKLFNIQVKEVTTNDGVTTIANNLTSTVQVFSDSEYQLPYVLGSAHQGCLPPFPADVFMIPQYGYLTLNNGSQAVGRSSFYCLEYFPSQMLRTGNNFTFSYTFEEVPFHSSYAHSQSLDRLMNPLIDQYLYYLNRTQNQSGSAQNKDLLFSRGSPAGMSVQPKNWLPGPCYRQQRVSKTKTDNNNSNFTWTGASKYNLNGRESIINPGTAVASHKDDEDKFFPMSGVMIFGKESAGANSTALDNVMITDEEEIKATNPVATERFGTVAVNFQSSSTDPATGDVHAMGALPGMVWQDRDVYLQGPIWAKIPHTDGHFHPSPLMGGFGLKNPPPQILIKNTPVPANPPAEFSATKFASFITQYSTGQVSVEIEWELQKENSKRWNPEVQYTSNYAKSANVDFTVDNNGLYTEPRPIGTRYLTRPL

SEQ ID NO: 306 - DNA, 2208 bp, Adeno-associated virus
atggctgccgatggttatcttccagattggctcaaggacactctctctgaaggaataagacagtggtggaagctcaaacctggcccaccaccaccaaagcccgcagagcggcataaggacgacagcgggggtcttgtgcttcctgggtacaagtacctcggacccttcaacggactcgacaagggagagccggtcaacgaggcagacgccgcggccctcgagtacgacaaggcctacgaccggcagctcgacagcggagacaacccgtacctcaagtacaaccacgccgacgcggagtttcaggagcgccttaaagaagatacgtcttttgggggcaacctcggacgagcagtcttccaggcgaaaaagagggttcttgaacctctgggcctggttgaggaacctgttaagacggctccgggaaaaaagaggccggtagagcactctcctgtggagccagactcctcctcgggaacaggaaaagcgggccagcagcctgcgagaaagagattgaattttggtcagactggagacgcagactccgtacctgacccccagcctctcggacagccaccagcagccccctctggtctgggaactaatacgatggctacaggcagtggcgcaccaatggcagacaataacgagggcgccgacggagtgggtaattcctcgggaagttggcattgcgattccacatggatgggcgacagagtcatcaccaccagcacccgaacctgggctctgcccacctacaacaaccatctgtacaagcagatctccagccaatcaggagccagcaacgacaaccactactttggctacagcaccccttgggggtattttgacttcaacagattccactgccacttttcaccacgtgactggcaaagactcatcaacaacaactggggattccggcccaagagactcaacttcaagctctttaacattcaagtcaaggaggtcacgcagaatgacggtacgacgacgattgccaataaccttaccagcacggttcaggtgtttactgactcggagtaccagctcccgtacgtccccggctcggcgcatcaaggatgcctcccgccgttcccagcagacgtcttcatggtgccacagtatggatacctcaccctgaacaacgggagtcaggcagtaggacgctcttcattttactgcctggagtactttccttctcagatgcttcgtaccggaaacaactttaccttcagctacacctttgaggatgttcctttccacagcagctacgctcacagccagagtttggaccgtctcatgaatcctctcatcgaccagtacctgtattacttgagcagaacaaacactccaagcggaaccaccacgcagtccaggcttcagttttctcaggccggagcaagtgacattcgggaccagtctaggaactggcttcctggaccctgttaccgccagcagcgagtatcaaagacagctgcggacaacaacaacagtgaatactcgtggactggagctaccaagtaccacctcaatggcagagactctctggtgaatccgggcccggccatggccagccacaaggacgatgaagaaaagttttttcctcaaagcggggttctcatctttgggaagcaaggctcagagaaaacaaatgtggacattgaaaaggtcatgattacagacgaagaggaaatcagaaccaccaatcccgtggccacggagcagtatggttctgtatctaccaacctccagagcggcaacacacaagcagctactgcagatgtcaacacacaaggcgttcttccaggcatggtctggcaggacagagacgtgcacctgcaggggcctatctgggcaaagattccacacacggacggacattttcacccctctcccctcatgggcggatttggacttaaacaccctcctccacagattctcatcaagaacaccccggtacctgcaaatccttcgaccaccttcagtgcggcaaagtttgcttccttcatcacacagtattccacagggcaggtcagcgtggagatcgagtgggagctgcagaaggagaacagcaaacgctggaaccccgagatccagtacacttccaactacaacaaatctgttaatgtggactttactgtggacactaatggtgtgtattcagagcctcgccccattggcaccagatacctgactcgtaatctgtaa

SEQ ID NO: 307 - protein, 735 aa, Adeno-associated virus
MAADGYLPDWLKDTLSEGIRQWWKLKPGPPPPKPAERHKDDSGGLVLPGYKYLGPFNGLDKGEPVNEADAAALEYDKAYDRQLDSGDNPYLKYNHADAEFQERLKEDTSFGGNLGRAVFQAKKRVLEPLGLVEEPVKTAPGKKRPVEHSPVEPDSSSGTGKAGQQPARKRLNFGQTGDADSVPDPQPLGQPPAAPSGLGTNTMATGSGAPMADNNEGADGVGNSSGSWHCDSTWMGDRVITTSTRTWALPTYNNHLYKQISSQSGASNDNHYFGYSTPWGYFDFNRFHCHFSPRDWQRLINNNWGFRPKRLNFKLFNIQVKEVTQNDGTTTIANNLTSTVQVFTDSEYQLPYVPGSAHQGCLPPFPADVFMVPQYGYLTLNNGSQAVGRSSFYCLEYFPSQMLRTGNNFTFSYTFEDVPFHSSYAHSQSLDRLMNPLIDQYLYYLSRTNTPSGTTTQSRLQFSQAGASDIRDQSRNWLPGPCYRQQRVSKTAADNNNSEYSWTGATKYHLNGRDSLVNPGPAMASHKDDEEKFFPQSGVLIFGKQGSEKTNVDIEKVMITDEEEIRTTNPVATEQYGSVSTNLQSGNTQAATADVNTQGVLPGMVWQDRDVHLQGPIWAKIPHTDGHFHPSPLMGGFGLKHPPPQILIKNTPVPANPSTTFSAAKFASFITQYSTGQVSVEIEWELQKENSKRWNPEIQYTSNYNKSVNVDFTVDTNGVYSEPRPIGTRYLTRNL

SEQ ID NO: 308 - DNA, 2208 bp, Adeno-associated virus
atggctgccgatggttatcttccagattggctcgaggacactctctctgaaggaataagacagtggtggaagctcaaacctggcccaccaccaccaaagcccgcagagcggcataaggacgacagcaggggtcttgtgcttcctgggtacaagtacctcggacccttcaacggactcgacaagggggagccggtcaacgaggcagacgccgcggccctcgagcacgacaaggcctacgaccggcagctcgacagcggagacaacccgtacctcaagtacaaccacgccgacgcagagtttcaggagcgccttaaagaagatacgtcttttgggggcaacctcggacgagcagtcttccaggcgaaaaagagggttcttgaacctctgggcctggttgaggaacctgttaagacggctccgggaaaaaagaggccggtagagcactctcctgtggagccagactcctcctcgggaaccggaaaagcgggccagcagcctgcaagaaaaagattaaattttggtcagactggagacgcagactccgtacctgacccccagcctctcggacagccaccagcagccccctctggtctgggatctactacaatggctacaggcagtggcgcaccaatggcagacaataacgagggtgccgatggagtgggtaattcctcaggaaattggcattgcgattcccaatggctgggcgacagagtcatcaccaccagcacccgaacctgggccctgcccacatacaacaaccacctctacaagcaaatctccagccaatcaggagccagcaacgacaaccactactttggctacagcaccccctgggggtattttgacttcaacagattccactgccacttttcaccacgtgactggcaaagactcatcaacaacaactggggattccggcccaaaagactcaacttcaagctctttaatattcaagtcaaagaggtcacgcagaatgacggtacgacgacgattgccaataaccttaccagcacggttcaggtgtttactgactcggagtaccagctcccgtacgtcctgggctcggcgcatcaaggatgcctcccgccgtttccagcggacgtcttcatggtcccacagtatggatacctcaccctgaacaacgggagtcaggcggtaggacgctcttccttttactgcctggagtactttccttctcagatgctgcgtactggaaacaactttcagttcagctacacttttgaagacgtgcctttccacagcagctacgctcacagccagagtctggatcggctgatgaatcctctgatcgaccagtacctgtattatctgaacaagacacaaacaaatagtggaactcttcagcagtctcggctactgtttagccaagctggaccaaccaacatgtctcttcaagctaaaaactggctgcctggaccttgctacagacagcagcgtctgtcaaaacaggcaaacgacaacaacaacagcaactttccctggactgcagctacaaagtatcatctaaatggccgggactcgttggttaatccaggaccagctatggccagtcgcaaggatgacgaagaaaagtttttccccatgcatggaaccctgatatttggtaaacaaggaacaaatgccaacgacgcggatttggaaaatgtcatgattacagatgaagaagaaatcagggccaccaatcccgtggctacggagcagtacgggactgtgtcaaataatttgcaaaactcaaacactggtccaactactggaactgtcaatcaccaaggagcgttacctggtatggtgtggcaggatcgagacgtgtacctgcagggacccatttgggccaagattcctcacaccgatggacactttcatccttctccactgatgggaggttttggactcaaacacccgcctcctcagatcatgatcaaaaacactcccgttccagccaatcctcccacaaacttcagttctgccaagtttgcttctttcatcacacagtattccacgggacaggtcagcgtggagatcgagtgggagctgcagaaggagaacagcaaacgctggaatcccgaaattcagtacacttccaactacaacaagtctgttaatgtggactttactgtggacactaatggtgtgtattcagagcctcgccccattggcaccagatacctgactcgtaatctgtaa

SEQ ID NO: 309 - protein, 735 aa, Adeno-associated virus
MAADGYLPDWLEDTLSEGIRQWWKLKPGPPPPKPAERHKDDSRGLVLPGYKYLGPFNGLDKGEPVNEADAAALEHDKAYDRQLDSGDNPYLKYNHADAEFQERLKEDTSFGGNLGRAVFQAKKRVLEPLGLVEEPVKTAPGKKRPVEHSPVEPDSSSGTGKAGQQPARKRLNFGQTGDADSVPDPQPLGQPPAAPSGLGSTTMATGSGAPMADNNEGADGVGNSSGNWHCDSQWLGDRVITTSTRTWALPTYNNHLYKQISSQSGASNDNHYFGYSTPWGYFDFNRFHCHFSPRDWQRLINNNWGFRPKRLNFKLFNIQVKEVTQNDGTTTIANNLTSTVQVFTDSEYQLPYVLGSAHQGCLPPFPADVFMVPQYGYLTLNNGSQAVGRSSFYCLEYFPSQMLRTGNNFQFSYTFEDVPFHSSYAHSQSLDRLMNPLIDQYLYYLNKTQTNSGTLQQSRLLFSQAGPTNMSLQAKNWLPGPCYRQQRLSKQANDNNNSNFPWTAATKYHLNGRDSLVNPGPAMASRKDDEEKFFPMHGTLIFGKQGTNANDADLENVMITDEEEIRATNPVATEQYGTVSNNLQNSNTGPTTGTVNHQGALPGMVWQDRDVYLQGPIWAKIPHTDGHFHPSPLMGGFGLKHPPPQIMIKNTPVPANPPTNFSSAKFASFITQYSTGQVSVEIEWELQKENSKRWNPEIQYTSNYNKSVNVDFTVDTNGVYSEPRPIGTRYLTRNL

SEQ ID NO: 310 - DNA, 2208 bp, Adeno-associated virus
atggctgccgatggttatcttccagattggctcgaggacactctctctgaaggaataagacagtggtggaagctcaaacctggcccaccaccaccaaagcccgcagagcggcataaggacgacagcaggggtcttgtgcttcctgggtacaagtacctcggacccttcaacggactcgacaagggagagccggtcaacgaggcagacgccgcggccctcgagcacgacaaagcctacgaccggcagctcgacagcggagacaacccgtacctcaagtacaaccacgccgacgcggagtttcaggagcgccttaaagaagatacgtcttttgggggcaacctcggacgagcagtcttccaggcgaaaaagagggttcttgaacctctgggcctggttggggaacctgtcaagacggctccaggaaaaaagaggccggtagagcactctcctgtggagccagactcctcctcgggaaccggaaaggcgggccagcagcctgcaagaaaaagattgaattttggtcagactggagacgcagactcagtacctgacccccagcctctcggacagccaccagcagccccctctggtctgggaactaatacgatggctacaggcagtggcgcaccaatggcagacaataacgagggcgccgacggagtgggtaattcctcgggaaattggcattgcgattccacatggatgggcgacagagtcatcaccaccagcacccgaacctgggccctgcccacctacaacaaccacctctacaaacaaatttccagccaatcaggagcctcgaacgacaatcactactttggctacagcaccccttgggggtattttgacttcaacagattccactgccacttttcaccacgtgactggcaaagactcatcaacaacaactggggattccgacccaagagactcaacttcaagctctttaacattcaagtcaaagaggtcacgcagaatgacggtacgacgacgattgccaataaccttaccagcacggttcaggtgtttactgactcggagtaccagctcccgtacgtcctcggctcggcgcatcaaggatgcctcccgccgttcccagcagacgtcttcatggtgccacagtatggatacctcaccctgaacaacgggagtcaggcagtaggacgctcttcattttactgcctggagtactttccttctcagatgctgcgtaccggaaacaactttaccttcagctacacttttgaggacgttcctttccacagcggctacgctcacagccagagtctggaccgtctcatgaatcctctcatcgaccagtacctgtattacttgagcacaacaaacactccaagtggaaccaccacgcagtcaaggcttcagttttctcaggccggagcgagtgacattcgggaccagtctaggaactggcttcctggaccctgttaccgccagcagcgagtatcaaagacatctgcggataacaacaacagtgaatactcgtggactggagctaccaagtaccacctcaatggcagagactctctggtgaatccgggcccggccatggcaagccacaaggacaatgaagaaaagttttttcctcagagcggggttctcatctttgggaagcaaggctcagagaaaacaaatgtggacattgaaaaggtcatgattacagacgaagaggaaatcaggacaaccaatcccgtggctacggagcagtacggttctgtatctaccaacctccagagaggcaacagacaagcagctaccgcagatgtcaacacacaaggcgttcttccaggcatggtctggcaggacagagatgtgtaccttcaggggcccatctgggcaaagattccacacacggacggacattttcacccctctcccctcatgggtggattcggacttaaacaccctcctccacagattctcatcaagaacaccccggtacctgcgaatccttcgaccaccttcagtgcggcaaagtttgcttccttcatcacacagtactccacgggacaggtcagcgtggagatcgagtgggagctgcagaaggaaaacagcaaacgctggaatcccgaaattcagtacacttccaactacaacaagtctgttaatgtggactttactgtggacactaatggcgtgtattcagagcctcgccccattggcaccagatacctgactcgtaatctgtaa

SEQ ID NO: 311 - protein, 735 aa, Adeno-associated virus
MAADGYLPDWLEDTLSEGIRQWWKLKPGPPPPKPAERHKDDSRGLVLPGYKYLGPFNGLDKGEPVNEADAAALEHDKAYDRQLDSGDNPYLKYNHADAEFQERLKEDTSFGGNLGRAVFQAKKRVLEPLGLVGEPVKTAPGKKRPVEHSPVEPDSSSGTGKAGQQPARKRLNFGQTGDADSVPDPQPLGQPPAAPSGLGTNTMATGSGAPMADNNEGADGVGNSSGNWHCDSTWMGDRVITTSTRTWALPTYNNHLYKQISSQSGASNDNHYFGYSTPWGYFDFNRFHCHFSPRDWQRLINNNWGFRPKRLNFKLFNIQVKEVTQNDGTTTIANNLTSTVQVFTDSEYQLPYVLGSAHQGCLPPFPADVFMVPQYGYLTLNNGSQAVGRSSFYCLEYFPSQMLRTGNNFTFSYTFEDVPFHSGYAHSQSLDRLMNPLIDQYLYYLSTTNTPSGTTTQSRLQFSQAGASDIRDQSRNWLPGPCYRQQRVSKTSADNNNSEYSWTGATKYHLNGRDSLVNPGPAMASHKDNEEKFFPQSGVLIFGKQGSEKTNVDIEKVMITDEEEIRTTNPVATEQYGSVSTNLQRGNRQAATADVNTQGVLPGMVWQDRDVYLQGPIWAKIPHTDGHFHPSPLMGGFGLKHPPPQILIKNTPVPANPSTTFSAAKFASFITQYSTGQVSVEIEWELQKENSKRWNPEIQYTSNYNKSVNVDFTVDTNGVYSEPRPIGTRYLTRNL

SEQ ID NO: 312 - DNA, 2208 bp, Adeno-associated virus
atggctgccgatggttatcttccagattggctcgaggacactctctctgaaggaataagacagtggtggaagctcaaacctggcccaccaccaccaaagcccgcagagcggcataaggacgacagcaggggtcttgtgcttcctgggtacaagtacctcggacccttcaacggactcgacaagggagagccggtcaacgaggcagacgccgcggccctcgagcacgacaaagcctacgaccggcagctcgacagcggagacaacccgtacctcaagtacaaccacgccgacgcggagtttcaggagcgccttaaagaagatacgtcttttgggggcaacctcggacgagcagtcttccaggcgaaaaagagggttcttgaacctctgggcctggttggggaacctgttaagacggctccgggaaaaaagaggccggtagagcactctcctgtggagccagactcctcctcgggaaccggaaaggcgggccagcagcctgcaagaaaaagattgaattttggtcagactggagacgcagactcagtacctgacccccagcctctcggacagccaccagcagccccctctggtctgggaactaatacgatggctacaggcagtggcgcaccaatggcagacaataacgagggcgccgacggagtgggtaattcctcgggaaatcggcattgcgattccacatggatgggcgacagagtcatcaccaccagcacccgaacctgggccctgcccacctacaacaaccacctctacagacaaatttccagccaatcaggagcctcgaacgacaatcactactttggctacagcaccccttgggggtattttgacttcaacagattccactgccacttttcaccacgtgactggcaaagactcatcaacaacaactggggattccgacccaagagactcaacttcaagctctttaacattcaagtcaaagaggtcacgcagaatgacggtacgacgacgattgccaataaccttaccagcacggttcaggtgtttactgactcggagtaccagctcccgtacgtcctcggctcggcgcatcaaggatgcctcccgccgttcccagcagacgtcttcatggtgccacagtatggatacctcaccctgagcaacgggagtcaggcagtaggacgctcttcattttactgcccggagtactttccttctcagatgctgcgtaccggaaacaactttaccttcagctacacttttgaggacgttcctttccacagcagctacgctcacagccagagtctggaccgtctcatgaatcctctcatcgaccagtacctgtattacttgagcacaacaaacactccaagtggaaccaccacgcagtcaaggcttcagttttctcaggccggagcgagtgacattcgggaccagtctaggaactggcttcctggaccctgttaccgccagcagcgagtatcaaagacatctgcggataacaacaacagtgaatactcgtggactggagctaccaagtaccacctcaatggcagagactctctggtgaatccgggcccggccatggcaagccacaaggacaatgaagaaaagttttttcctcagagcggggttctcatctttgggaagcaaggctcagagaaaacaaatgtggacattgaaaaggtcatgattacagacgaagaggaaatcaggacaaccaatcccgtggctacggagcagtatggttctgtatctaccaacctccagagaggcaacagacaagcagctaccgcagatgtcaacacacaaggcgttcttccaggcatggtctggcaggacagagatgtgtaccttcaggggcccatctgggcaaagattccacacacggacggacattttcacccctctcccctcatgggtggattcggacctaaacaccctcctccacagattctcatcaagaacaccccggtacctgcgaatccttcgaccaccttcagtgcggcaaagtttgcttccttcatcacacagtactccacgggacaggtcagcgtggagatcgagtgggagctgcagaaggaaaacagcaaacgctggaatcccgaaattcagtacacttccaactacaacaagtctgttaatgtggactttactgtggacactaatggcgtgtattcagagcctcgccccattggcaccagatacctgactcgtaatttgtaa

SEQ ID NO: 313 - protein, 735 aa, Adeno-associated virus
MAADGYLPDWLEDTLSEGIRQWWKLKPGPPPPKPAERHKDDSRGLVLPGYKYLGPFNGLDKGEPVNEADAAALEHDKAYDRQLDSGDNPYLKYNHADAEFQERLKEDTSFGGNLGRAVFQAKKRVLEPLGLVGEPVKTAPGKKRPVEHSPVEPDSSSGTGKAGQQPARKRLNFGQTGDADSVPDPQPLGQPPAAPSGLGTNTMATGSGAPMADNNEGADGVGNSSGNRHCDSTWMGDRVITTSTRTWALPTYNNHLYRQISSQSGASNDNHYFGYSTPWGYFDFNRFHCHFSPRDWQRLINNNWGFRPKRLNFKLFNIQVKEVTQNDGTTTIANNLTSTVQVFTDSEYQLPYVLGSAHQGCLPPFPADVFMVPQYGYLTLSNGSQAVGRSSFYCPEYFPSQMLRTGNNFTFSYTFEDVPFHSSYAHSQSLDRLMNPLIDQYLYYLSTTNTPSGTTTQSRLQFSQAGASDIRDQSRNWLPGPCYRQQRVSKTSADNNNSEYSWTGATKYHLNGRDSLVNPGPAMASHKDNEEKFFPQSGVLIFGKQGSEKTNVDIEKVMITDEEEIRTTNPVATEQYGSVSTNLQRGNRQAATADVNTQGVLPGMVWQDRDVYLQGPIWAKIPHTDGHFHPSPLMGGFGPKHPPPQILIKNTPVPANPSTTFSAAKFASFITQYSTGQVSVEIEWELQKENSKRWNPEIQYTSNYNKSVNVDFTVDTNGVYSEPRPIGTRYLTRNL

SEQ ID NO: 314 - DNA, 2205 bp, Adeno-associated virus
atggctgccgatggttatcttccagattggctcgaggacactctctctgaaggaataagacagtggtggaagctcaaacctggcccaccaccaccaaagcccgcagagcggcataaggacgacagcaggggtcttgtgcttcctgggtacaagtacctcggacccttcaacggactcgacaagggagagccggtcaacgaggcagacgccgcggccctcgagcacgacaaggcctacgaccggcagctcgacagcggagacaacccgtacctcaagtacaaccacgccgacgcggagtttcaggagcgtcttaaagaagatacgtcttttgggggcaacctcggacgagcagtcttccaggcgaaaaagagggttcttgaacctctgggcctggttgaggaacctgttaagacggctccgggaaaaaagaggccggtagagcactctcctgcggagccagactcctcctcgggaaccggaaaagcgggccagcagcctgcaagaaaaagactgaatttcggtcagactggagacgcagactccgtacctgacccccagcctctcagacagccaccagcagcccccacaagtttgggatctactacaatggctacaggcagtggcgcaccaatggcagacaataacgagggtgccgatggagtgggtaattcctcaggaaattggcattgcgattcccaatggctgggcgacagagtcatcaccaccagcacccgaacctgggccctgcccacctacaacaaccacctttacaagcaaatctccagccaatcaggagcctcaaacgacaaccactactttggctacagcaccccctgggggtattttgacttcaacagattccactgccacttttcaccacgtgactggcaaagactcatcaacaacaactggggattccgacccaagagactcaacttcaagctctttaacattcaagtcaaagaggtcacgcagaatgacggtacgacgacgattgccaataaccttaccagcacggttcaggtgtttactgactcggagtaccagctcccgtacgtcctcggctcggcgcatcaaggatgcctcccgccgtttccagcggacgtcttcatggtcccacagtatggatacctcaccctgaacaacgggagtcaggcggtaggacgctcttccttttactgcctggagtactttccttctcagatgctgcgtactggaaacaactttcagttcagctacacttttgaagacgtgcctttccacagcagctacgctcacagccagagtttggatcggctgatgaatcctctgatcgaccagtacctgtattatctaaacagaacacaaacagctagtggaactcagcagtctcggctactgtttagccaagctggacccacaagcatgtctcttcaagctaaaaactggctgcctggaccgtgttatcgccagcagcgtttgtcaaagcaggcaaacgacaacaacaacagcaactttccctggactggagctaccaagtactacctcaatggcagagactctttggtgaacccgggcccggccatggccagccacaaggacgatgaagaaaagtttttccccatgcatggaaccctaatatttggtaaagaaggaacaaatgctaccaacgcggaattggaaaatgtcatgattacagatgaagaggaaatcaggaccaccaatcccgtggctacagagcagtacggatatgtgtcaaataatttgcaaaactcaaatactgctgcaagtactgaaactgtgaatcaccaaggagcattacctggtatggtgtggcaggatcgagacgtgtacctgcagggacccatttgggccaagattcctcacaccgatggacactttcatccttctccactgatgggaggttttggactcaaacacccgcctcctcagattatgatcaaaaacactcccgttccagccaatcctcccacaaacttcagttctgccaagtttgcttccttcatcacacagtattccacgggacaggtcagcgtggagatcgagtgggagctgcagaaggagaacagcaaacgctggaatcccgaaattcagtacacttccaactacaacaaatctgttaatgtggactttactgtggacactaatggtgtgtattcagagcctcgccccattggcaccagatacctgactcgtaatctgtaa

SEQ ID NO: 315 - protein, 734 aa, Adeno-associated virus
MAADGYLPDWLEDTLSEGIRQWWKLKPGPPPPKPAERHKDDSRGLVLPGYKYLGPFNGLDKGEPVNEADAAALEHDKAYDRQLDSGDNPYLKYNHADAEFQERLKEDTSFGGNLGRAVFQAKKRVLEPLGLVEEPVKTAPGKKRPVEHSPAEPDSSSGTGKAGQQPARKRLNFGQTGDADSVPDPQPLRQPPAAPTSLGSTTMATGSGAPMADNNEGADGVGNSSGNWHCDSQWLGDRVITTSTRTWALPTYNNHLYKQISSQSGASNDNHYFGYSTPWGYFDFNRFHCHFSPRDWQRLINNNWGFRPKRLNFKLFNIQVKEVTQNDGTTTIANNLTSTVQVFTDSEYQLPYVLGSAHQGCLPPFPADVFMVPQYGYLTLNNGSQAVGRSSFYCLEYFPSQMLRTGNNFQFSYTFEDVPFHSSYAHSQSLDRLMNPLIDQYLYYLNRTQTASGTQQSRLLFSQAGPTSMSLQAKNWLPGPCYRQQRLSKQANDNNNSNFPWTGATKYYLNGRDSLVNPGPAMASHKDDEEKFFPMHGTLIFGKEGTNATNAELENVMITDEEEIRTTNPVATEQYGYVSNNLQNSNTAASTETVNHQGALPGMVWQDRDVYLQGPIWAKIPHTDGHFHPSPLMGGFGLKHPPPQIMIKNTPVPANPPTNFSSAKFASFITQYSTGQVSVEIEWELQKENSKRWNPEIQYTSNYNKSVNVDFTVDTNGVYSEPRPIGTRYLTRNL

SEQ ID NO: 316 - DNA, 3160 bp, Adeno-associated virus
acccttcactaaagggactagtcctgcaggtttaaacgaattcgcccttgctgcgtcaactggaccaatgagaactttcccttcaacgactgtgtcgacaagatggtgatttggtgggaggaggggaagatgaccgccaaggtcgtggagtcggccaaagccattctcggaggaagcaaggtgcgcgtggaccagaaatgcaagtcctcggcccagatagatccgactcccgtgatcgtcacctccaacaccaacatgtgcgccgtgattgacgggaactcaacgaccttcgaacaccagcagccgttgcaagaccggatgttcaaatttgaactcacccgccgtctggatcatgactttgggaaggtcaccaagcgggaagtcaaagactttttccggtgggcaaaggatcacgtggttgaggtggagcatgaattctacgtcaaaaagggtggagccaagaaaagacccgcccctagtgacgcagatataagtgagcccaaacgggtgcgcgagtcagttgcgcagccatcgacgtcagacgcggaagcttcgatcaactacgcggacaggtaccaaaacaaatgttctcgtcacgtgggcatgaatctgatgctgtttccctgcagacaatgcgagagaatgaatcaaaattcaaatatctgcttcactcacggacagaaagactgtttagagtgctttcccgtgtcagaatctcaacctgtttctgtcgtcaaaaaggcgtatcagaaactgtgctacattcatcatatcatgggaaaggtgccagacgcttgcactgcctgcgatctggtcaatgtggatttggatgactgcatctctgaacaataaatgatttaaatcaggtatggctgccgatggttatcttccagattggctcgaggacactctctctgaaggaataagacagtggtggaagctcaaacctggcccaccaccaccaaagcccgcagagcggcataaggacgacagcaggggtcttgtgcttcctgggtacaagtacctcggacccttcaacggactcgacaagggagagccggtcaacgaggcagacgccgcggccctcgagcacgacaaggcctacgaccggcagctcgacagcggagacaacccgtacctcaagtacaaccacgccgacgcggagtttcaggagcgtcttaaagaagatacgtcttttgggggcaacctcggacgagcagtcttccaggcgaaaaagagggttcttgaacctctgggcctggttgaggaacctgttaagacggctccgggaaaaaagaggccggtagagcactctcctgcggagccagactcctcctcgggaaccggaaaagcgggccagcagcctgcaagaaaaagactgaatttcggtcagactggagacgcagactccgtacctgacccccagcctctcagacagccaccagcagcccccacaagtttgggatctactacaatggctacaggcagtggcgcaccaatggcagacaataacgagggtgccgatggagtgggtaattcctcaggaaattggcattgcgattcccaatggctgggcgacagagtcatcaccaccagcacccgaacctgggccctgcccacctacaacaaccacctttacaagcaaatctccagccaatcaggagcctcaaacgacaaccactactttggctacagcaccccctgggggtattttgacttcaacagattccactgccacttttcaccacgtgactggcaaagactcatcaacaacaactggggattccgacccaagagactcaacttcaagctctttaacattcaagtcaaagaggtcacgcagaatgacggtacgacgacgattgccaataaccttaccagcacggttcaggtgtttactgactcggagtaccagctcccgtacgtcctcggctcggcgcatcaaggatgcctcccgccgtttccagcggacgtcttcatggtcccacagtatggatacctcaccctgaacaacgggagtcaggcggtaggacgctcttccttttactgcctggagtactttccttctcagatgctgcgtactggaaacaactttcagttcagctacacttttgaagacgtgcctttccacagcagctacgctcacagccagagtttggatcggctgatgaatcctctgatcgaccagtacctgtattatctaaacagaacacaaacagctagtggaactcagcagtctcggctactgtttagccaagctggacccacaagcatgtctcttcaagctaaaaactggctgcctggaccgtgttatcgccagcagcgtttgtcaaagcaggcaaacgacaacaacaacagcaactttccctggactggagctaccaagtactacctcaatggcagagactctttggtgaacccgggcccggccatggccagccacaaggacgatgaagaaaagtttttccccatgcatggaaccctaatatttggtaaagaaggaacaaatgctaccaacgcggaattggaaaatgtcatgattacagatgaagaggaaatcaggaccaccaatcccgtggctacagagcagtacggatatgtgtcaaataatttgcaaaactcaaatactgctgcaagtactgaaactgtgaatcaccaaggagcattacctggtatggtgtggcaggatcgagacgtgtacctgcagggacccatttgggccaagattcctcacaccgatggacactttcatccttctccactgatgggaggttttggactcaaacacccgcctcctcagattatgatcaaaaacactcccgttccagccaatcctcccacaaacttcagttctgccaagtttgcttccttcatcacacagtattccacgggacaggtcagcgtggagatcgagtgggagctgcagaaggagaacagcaaacgctggaatcccgaaattcagtacacttccaactacaacaaatctgttaatgtggactttactgtggacactaatggtgtgtattcagagcctcgccccattggcaccagatacctgactcgtaatctgtaattgcttgttaatcaataaaccgtttaattcgtttcagttgaactttggtctctgcgaagggcgaattcgcggccgctaaatcaatcg

SEQ ID NO: 317 - protein, 734 aa, Adeno-associated virus
MAADGYLPDWLEDTLSEGIRQWWKLKPGPPPPKPAERHKDDSRGLVLPGYKYLGPFNGLDKGEPVNEADAAALEHDKAYDRQLDSGDNPYLKYNHADAEFQERLKEDTSFGGNLGRAVFQAKKRVLEPLGLVEEPVKTAPGKKRPVEHSPAEPDSSSGTGKAGQQPARKRLNFGQTGDADSVPDPQPLGQPPAAPTSLGSTTMATGSGAPMADNNEGADGVGNSSGNWHCDSQWLGDRVITTSTRTWALPTYNNHLYKQISSQSGASNDNHYFGYSTPWGYFDFNRFHCRFSPRDWQRLINNNWGFRPKRLNFKLFNIQVKEVTQNDGTTTIANNLTSTVQVFTDSEYQLPYVLGSAHQGCLPPFPADVFMVPQYGYLTLNNGSQAVGRSSFYCLEYFPSQMLRTGNNFQFSYTFEDVPFHSSYAHSQGLDRLMNPLIDQYLYYLNRTQTASGTQQSRLLFSQAGPTSMSLQAKNWLPGPCYRQQRLSKQANDNNNSNFPWTGATKYHLNGGDSLVNPGPAMASHKDDEEKFFPMHGTLIFGKEGTNATNAELENVMITDEEEIRTTNPVATEQYGYVSNNLQNSNTAASTETVNHQGALPGMVWQDRDVYLRGPIWAKIPHADGHFHPSPLMGGFGLKHPPPQIMIKNTPVPANPPTNFSSAKFASFITQYSTGQVSVEIEWELQKENSKRWNPEIQYTSNYNKSVNVDFTVDTNGVYSEPRPIGTRYLTRNL

SEQ ID NO: 318 - DNA, 3157 bp, Adeno-associated virus
ctcactaagggactagtcctgcaggtttaaacgaattcgcccttgctgcgtcaactggaccaatgagaactttcccttcaacgactgtgtcgacaagatggtgatttggtgggaggaggggaagatgaccgccaaggtcgtggagtcggccaaagccactctcggaggaagcaaggtgcgcgtggaccagaaacgcaagtcctcggcccagatagatccgactcccgtgatcgtcacctccaacaccaacatgtgcgccgtgattgacgggaactcaacgaccttcgaacaccagcagccgttgcaagaccgaatgttcaaatttgaactcacccgccgtctggatcatgacttcgggaaggtcaccaagcaggaagtcaaagactttttccggtgggcaaaggatcacgtggttgaggtggagcatgaattctacgtcaaaaagggtggagccaagaaaagacccgcccctagtgacgcagatataagtgagcccaaacgggtgcgcgagtcagttgcgcagccatcgacgtcagacgcggaagcttcgatcaactacgcggacaggtaccaaaacaaatgttctcgtcacgtgggcatgaatctgatgctgtttccctgcagacaatgcgagagaatgaatcaaaattcaaatatctgcttcactcacggacagaaagactgtttagagtgctttcccgtgtcagaatctcaacctgtttctgtcgtcaaaaaggcgtatcagaaactgtgctacattcatcatatcatgggaaaggtgccagacgcttgcactgcctgcgatctggtcaatgtggatttggatgactgcatctctgaacaataaatgatttaaatcaggtatggctgccgatggttatcttccagattggctcgaggacactctctctgaaggaataagacagtggtggaagctcaaacctggcccaccaccaccaaagcccgcagagcggcataaggacgacagcaggggtcttgtgcttcctgggtacaagtacctcggacccttcaacggactcgacaagggagagccggtcaacgaggcagacgccgcggctctcgagcacgacaaggcctacgaccggcagctcgacagcggagacaacccgtacctcaagtacaaccacgccgacgcggagtttcaggagcgtcttaaagaagatacgtcttttgggggcaacctcggacgagcagtcttccaggcgaaaaagagggttcttgaacctctgggcctggttgaggaacctgttaagacggctccgggaaaaaagaggccggtagagcactctcctgcggagccagactcctcctcgggaaccggaaaagcgggccagcagcctgcaagaaaaagactgaatttcggtcagactggagacgcagactccgtacctgacccccagcctctcggacagccaccagcagcccccacaagtttgggatctactacaatggctacaggcagtggcgcaccaatggcagacaataacgagggtgccgatggagtgggtaattcctcaggaaattggcattgcgattcccaatggctgggcgacagagtcatcaccaccagcacccgaacctgggccctgcccacctacaacaaccacctttacaagcaaatctccagccaatcaggagcctcaaacgacaaccactactttggctacagcaccccctgggggtattttgacttcaacagattccactgccgcttttcaccacgtgactggcaaagactcatcaacaacaactggggattccgacccaagagactcaacttcaagctctttaacattcaagtcaaagaggtcacgcagaatgacggtacgacgacgattgccaataaccttaccagcacggttcaggtgtttactgactcggagtaccagctcccgtacgtcctcggctcggcgcatcaaggatgcctcccgccgtttccagcggacgtcttcatggtcccacagtatggatacctcaccctgaacaacgggagtcaggcggtaggacgctcttccttttactgcctggagtactttccttctcagatgctgcgtactggaaacaactttcagttcagctacacttttgaagacgtgcctttccacagcagctacgctcacagccagggtttggatcggctgatgaatcctctgatcgaccagtacctgtattatctaaacagaacacaaacagctagtggaactcagcagtctcggctactgtttagccaagctggacccacaagcatgtctcttcaagctaaaaactggctgcctggaccgtgttatcgccagcagcgtttgtcaaagcaggcaaacgacaacaacaacagcaactttccctggactggagctaccaagtaccacctcaatggcggagactctttggtgaacccgggcccggccatggccagccacaaggacgatgaagaaaagtttttccccatgcatggaaccctaatatttggtaaagaaggaacaaatgctaccaacgcggaattggaaaatgtcatgattacagatgaagaggaaatcaggaccaccaatcccgtggctacagagcagtacggatatgtgtcaaataatttgcaaaactcaaatactgctgcaagtactgaaactgtgaatcaccaaggagcattacctggtatggtgtggcaggatcgagacgtgtacctgcggggacccatttgggccaagattcctcacgccgatggacactttcatccttctccactgatgggaggttttggactcaaacacccgcctcctcagattatgatcaaaaacactcccgttccagccaatcctcccacaaacttcagttctgccaagtttgcttccttcatcacacagtattccacgggacaggtcagcgtggagatcgagtgggagctgcagaaggagaacagcaaacgctggaatcccgaaattcagtacacttccaactacaacaaatctgttaatgtggactttactgtggacactaatggtgtgtattcagagcctcgccccattggcaccagatacctgactcgtaatctgtaattgcttgttaatcaataaaccgtttaattcgtttcagttgaactttggtctctgcgaagggcgaattcgcggccgctaaattcaattcg

SEQ ID NO: 319 - protein, 734 aa, Adeno-associated virus
MAADGYLPDWLEDTLSEGIRQWWKLKPGPPPPKPAERHKDDSRGLVLPGYKYLGPFNGLDKGEPVNEADAAALEHDKAYDRQLDSGDNPYLKYNHADAEFQERLKEDTSFGGNLGRAVFQAKKRVLEPLGLVEEPVKTAPGKKRPVEHSPAEPDSSSGTGKAGQQPARKRLNFGQTGDADSVPDPQPLGQPPAAPTSLGSTTMATGSGAPMADNNEGADGVGNSSGNWHCDSQWLGDRVITTSTRTWALPTYNNHLYKQISSQSGASNDNHYFGYSTPWGYFDFNRFHCHFSPRDWQRLINNNWGFRPKRLNFKLFNIQVKEVTQNDGTTTIANNLTSTVQVFTDSEYQLPYVLGSAHQGCLPPFPADVFMVPQYGYLTLNNGSQAVGRSSFYCLECFPSQMLRTGNNFQFSYTFEDVPFHSSYAHSQSLDRLMNPLIDQYLYYLNRTQTASGTQQSRLLFSQAGPTSMSLQAKNWLPGPCYRQQRLSKQANDNNNSNFPWTGATKYHLNGRDSLVNPGPAMASHKDDEEKFFPMHGTLIFGKEGTNATNAELENVMITDEEEIRTTNPVATEQYGYVSNNLQNSNTAASTETVNHQGALPGMVWQDRDVYLQGPIWAKIPHTDGHFHPSPLMGGFGLKHPPPQIMIKNTPVPANPPTNFSSAKFASFITQYSTGQVSVEIEWELQKENSKRWNPEIQYTSNYNKSVNVDFTVDTNGVYSEPRPIGTRYLTRNL

SEQ ID NO: 320 - DNA, 2208 bp, Adeno-associated virus
atggctgccgatggttatcttccagattggctcgaggacactctctctgaaggaataagacagtggtggaagctcaaacctggcccaccaccaccaaagcccgcagagcggcataaggacgacagcaggggtcttgtgcttcctggatacaagtacctcggacccttcaacggactcgacaagggagagccggtcaacgaggcagacgccgcggccctcgagcacgacaaggcctacgaccggcagctcgacagcggagacaacccgtacctcaagtacaaccacgccgacgcggagtttcaggagcgccttaaagaagatacgtcttttgggggcaacctcggacgagcagtcttccaggcgaaaaagagggttcttgaacctctgggcctggttgaggaacctgttaagacggctccgggaaaaaagaggccggtagagcactctcctgtggagccagactcctcctcgggaaccggaaaagcgggcaaccagcctgcaagaaaaagattgaatttcggtcagactggagacgcagactccgtacctgacccccagcctctcggacagccaccagcatccccctctggtctgggaactaatacgatggctacaggcagtggcgcaccaatggcagacaataacgagggcgccgacggagtgggtaattcctcgggaaattggcattgcgattccacatggatgggcgacagagtcgtcaccaccagcacccgcacctgggccctgcccacctacaacaaccacctctacaagcagatttccagccaatcaggagccagcaacgacaaccactactttggctacagcaccccttgggggtattttgacttcaacagattccactgccacttttcgccacgcgactggcagagactcatcaacaacaactggggattccggcccaaaagactcaacttcaagctgtttaacattcaagtcaaggaggtcacgcagaatgacggtacgacgacgattgccaataaccttaccagcacggttcaggtgtttactgacttggagtaccagctcccgtacgtcctcggctcggcgcatcaaggatgcctcccgccgttcccagcagacgtcttcatggtgccacagtatggatacctcaccctgaacaacgggagtcaggcggtaggacgctcttccttttactgcctggagtactttccttctcagatgcttcgcaccggaaacaactttaccttcagctacacttttgaagacgttcctttccacagcagctacgctcacagtcaaagtctggaccgtctcatgaatcctctcatcgaccagtacctgtattacttgagcagaacaaacactccaagcggaaccactacgcagtccaggcttcagttttctcaggccggagcgagtgacattcgggaccagtctaggaactggcttcctggaccctgttaccgccagcagcgagtatcaaagacagctgcggataacaacaacagtgaatactcgtggactggagctaccaagtaccacctcaatggcagagactctctggtgaatccgggcccggccatggccagccacaaggacgatgaagaaaagttttttcctcaaagcggggttctcatctttgggaagcaaggctcagagaaaacaaatgtggacattgaaaaggtcatgattacagacgaagaggaaatcaggaccaccaatcccgtggctacggagcagtatggttctgtatctaccaacctccagagcggcaacacacaagcagctacctcagatgtcaacacacaaggcgttcttccaggcatggtctggcaggacagagacgtgtacctgcaggggcccatctgggcaaaaattccacacacggacggacattttcacccctctcccctcatgggcggatttggacttaaacaccctcctccacagattctcattaagaataccccggtacctgcgaatccttcgaccaccttcagcgcggcaaagtttgcttccttcatcacacagtattccacggggcaggtcagcgtggagatcgagtgggagctgcagaaggagaacagcaaacgctggaatcccgaaattcagtacacttccaactacaacaaatctgttaatgtggactttactgtggacactaatggggtgtattcagagcctcgccctattggcaccagatacctgactcgtaatctgtaa

SEQ ID NO: 321 - DNA, 3159 bp, Adeno-associated virus
gattgatttagcggccgcgaattcgcccttgctgcgtcaactggaccaatgagaactttcccttcaacgattgcgtcgacaagatggtgatctggtgggaggagggaaagatgaccgccaaggtcgtggagtcggccaaagccattctcggaggaagcaaggtgcgtgtggaccaaaagtgcaagtcttcggcccagatcgacccgactcccgtgatcgtcacctccaacaccaacatgtgcgccgtgattgatggaaactcaacgaccttcgagcaccagcagccgttgcaagaccggatgttcaaatttgaacttacccgccgtctggatcatgactttggaaaggtcaccaagcaggaagtgaaagactttttccggtgggcaaaggatcacgtggttgaggtggagcatgagttctacgtcaaaaagggtggagccaaaaaaagacccgcccccagtgacgcagatataagtgagcccaaacgggcgcgcgagtcagttgcgcagccatcgacgtcagacgcggaagcttcgatcaactacgcggacaggtaccaaaacaaatgttctcgtcacgtgggcatgaatctgatgctgtttccctgcagacaatgcgagagaatgaatcagaattcaaatatctgcttcactcacggacagaaagactgtccatagtgctttcccgtgtcagaatctcaacccgtttctgtcgtcaaaaaggcgtatcagaaactgtgctacattcatcacatcatgggaaaggtgccagacgcttgcactgcttgcgacctggtcaatgtggatttggatgactgcatctctgaacaataaatgatttaaatcaggtatggctgccgatggttatcttccagattggctcgaggacactctctctgaaggaataagacagtggtggaagctcaaacctggcccaccaccaccaaagcccgcagagcggcataaggacgacagcaggggtcttgtgcttcctggatacaagtacctcggacccttcaacggactcgacaagggagagccggtcaacgaggcagacgccgcggccctcgagcacgacaaggcctacgaccggcagctcgacagcggagacaacccgtacctcaagtacaaccacgccgacgcggagtttcaggagcgccttaaagaagatacgtcttttgggggcaacctcggacgagcagtcttccaggcgaaaaagagggttcttgaacctctgggcctggttgaggaacctgttaagacggctccgggaaaaaagaggccggtagagcactctcctgtggagccagactcctcctcgggaaccggaaaagcgggcaaccagcctgcaagaaaaagattgaatttcggtcagactggagacgcagactccgtacctgacccccagcctctcggacagccaccagcatccccctctggtctgggaactaatacgatggctacaggcagtggcgcaccaatggcagacaataacgagggcgccgacggagtgggtaattcctcgggaaattggcattgcgattccacatggatgggcgacagagtcgtcaccaccagcacccgcacctgggccctgcccacctacaacaaccacctctacaagcagatttccagccaatcaggagccagcaacgacaaccactactttggctacagcaccccttgggggtattttgacttcaacagattccactgccacttttcgccacgcgactggcagagactcatcaacaacaactggggattccggcccaaaagactcaacttcaagctgtttaacattcaagtcaaggaggtcacgcagaatgacggtacgacgacgattgccaataaccttaccagcacggttcaggtgtttactgacttggagtaccagctcccgtacgtcctcggctcggcgcatcaaggatgcctcccgccgttcccagcagacgtcttcatggtgccacagtatggatacctcaccctgaacaacgggagtcaggcggtaggacgctcttccttttactgcctggagtactttccttctcagatgcttcgcaccggaaacaactttaccttcagctacacttttgaagacgttcctttccacagcagctacgctcacagtcaaagtctggaccgtctcatgaatcctctcatcgaccagtacctgtattacttgagcagaacaaacactccaagcggaaccactacgcagtccaggcttcagttttctcaggccggagcgagtgacattcgggaccagtctaggaactggcttcctggaccctgttaccgccagcagcgagtatcaaagacagctgcggataacaacaacagtgaatactcgtggactggagctaccaagtaccacctcaatggcagagactctctggtgaatccgggcccggccatggccagccacaaggacgatgaagaaaagttttttcctcaaagcggggttctcatctttgggaagcaaggctcagagaaaacaaatgtggacattgaaaaggtcatgattacagacgaagaggaaatcaggaccaccaatcccgtggctacggagcagtatggttctgtatctaccaacctccagagcggcaacacacaagcagctacctcagatgtcaacacacaaggcgttcttccaggcatggtctggcaggacagagacgtgtacctgcaggggcccatctgggcaaaaattccacacacggacggacattttcacccctctcccctcatgggcggatttggacttaaacaccctcctccacagattctcattaagaataccccggtacctgcgaatccttcgaccaccttcagcgcggcaaagtttgcttccttcatcacacagtattccacggggcaggtcagcgtggagatcgagtgggagctgcagaaggagaacagcaaacgctggaatcccgaaattcagtacacttccaactacaacaaatctgttaatgtggactttactgtggacactaatggggtgtattcagagcctcgccctattggcaccagatacctgactcgtaatctgtaattgcttgttaatcaataaaccgtttaattcgtttcagttgaactttggtctctgcgaagggcgaattcgtttaaacctgcaggactagtccctttagtgagg

SEQ ID NO: 322 - protein, 735 aa, Adeno-associated virus
MAADGYLPDWLEDTLSEGIRQWWKLKPGPPPPKPAERHKDDSRGLVLPGYKYLGPFNGLDKGEPVNEADAAALEHDKAYDRQLDSGDNPYLKYNHADAEFQERLKEDTSFGGNLGRAVFQAKKRVLEPLGLVEEPVKTAPGKKRPVEHSPVEPDSSSGTGKAGNQPARKRLNFGQTGDADSVPDPQPLGQPPASPSGLGTNTMATGSGAPMADNNEGADGVGNSSGNWHCDSTWMGDRVVTTSTRTWALPTYNNHLYKQISSQSGASNDNHYFGYSTPWGYFDFNRFHCHFSPRDWQRLINNNWGFRPKRLNFKLFNIQVKEVTQNDGTTTIANNLTSTVQVFTDLEYQLPYVLGSAHQGCLPPFPADVFMVPQYGYLTLNNGSQAVGRSSFYCLEYFPSQMLRTGNNFTFSYTFEDVPFHSSYAHSQSLDRLMNPLIDQYLYYLSRTNTPSGTTTQSRLQFSQAGASDIRDQSRNWLPGPCYRQQRVSKTAADNNNSEYSWTGATKYHLNGRDSLVNPGPAMASHKDDEEKFFPQSGVLIFGKQGSEKTNVDIEKVMITDEEEIRTTNPVATEQYGSVSTNLQSGNTQAATSDVNTQGVLPGMVWQDRDVYLQGPIWAKIPHTDGHFHPSPLMGGFGLKHPPPQILIKNTPVPANPSTTFSAAKFASFITQYSTGQVSVEIEWELQKENSKRWNPEIQYTSNYNKSVNVDFTVDTNGVYSEPRPIGTRYLTRNL

SEQ ID NO: 323 - DNA, 2205 bp, Adeno-associated virus
atggctgccgatggttatcttccagattggctcgaggacactctctctgaaggaataagacagtggtggaagctcaaacctggcccaccaccaaagcccgcagagcggcataaggacgacagcaggggtcttgtgcttcctggatacaagtacctcggacccttcaacggactcgacaagggagagccggtcaacgaggcagacgccgcggccctcgagcacgacaaggcctacgaccggcagctcgacagcggagacaacccgtacctcaagtacaaccacgccgacgcggagtttcaggagcgccttaaagaagatacgtcttttgggggcaacctcggacgagcagtcttccaggcgaaaaagagggttcttgaacctctgggcctggttgaggaacctgttaagacggctccgggaaaaaagaggcccgtagagcactctcctgtggagccagactcctcctcgggaaccggaaaagcgggcaaccagcctgcaagaaaaagattgaatttcggtcagactggagacgcagactccgtacctgacccccagcctctcggacagccaccagcagccccctctggtctgggaactaatacgatggctacaggcagtggcgcaccaatggcagacaataacgagggcgccgacggagtgggtaattcctcgggagattggcattgcgattccacatggatgggcgacagagtcatcaccaccagcacccgcacctgggccctgcccacctacaacaaccacctctacaagcagatttccagccaatcaggagccagcaatgacaaccactactttggctacagcaccccttgggggtattttgacttcaacagattccactgccacttttcgccacgcgactggcagagactcatcaacaacaactggggattccggcccaaaagactcaacctcaagctgtttaacattcaagtcaaggaggtcacgcagaatgacggtacgacgacgattgccaataaccttaccagcacggttcaggtgtttactgacttggagtaccagctcccgtacgtcctcggctcggcgcatcaaggatgcctcccgccgttcccagcagacgtcttcatggtgccacagtatggatacctcaccctgaacaacgggagtcaggcggtaggacgctcttccttttactgcctggagtactttccttctcagatgcttcgtaccggaaacaactttaccttcagctacacttttgaagacgttcctttccacagcagctacgctcacagtcaaagtctggaccgtctcatgaatcctctcatcgaccagtacctgtattacttgagcagaacaaacactccaagcggaaccactacgcagtccaggcttcagttttctcaggccggagcgagtgacattcgggaccagtctaggaactggcttcctggaccctgttaccgccagcagcgagtatcaaagacagctgcggataacaacaacggtgaatactcgtggactggagctaccaagtaccacctcaatggcagagactctctggtgaatccgggcccggccatggccagccacaaggacgatgaagaaaagttttttcctcaaagcggggttctcatctttgggaagcaaggctcagagaaaacaaatgtggacattgaaaaggtcatgattacagacgaagaggaaatcaggaccaccaatcccgtggctacggagcagtatggttctgtatctaccaacctccagagcggcaacacacgagcagctacctcagatgtcaacacacaaggcgttcttccaggcatggtctggcaggacagagacgtgtacctgcaggggcccatctgggcaaaaattccacacacggacggacattttcacccctctcccctcatgggcggatttggacttaaacaccctcctccacagattctcattaagaataccccggtacctgcgaatccttcgaccaccttcagcgcggcaaagtttgcttccttcatcacacagtattccacggggcaggtcagcgtggagatcgagtgggagctgcagaaggagaacagcaaacgctggaatcccgaaattcagtacacttccaactacaacaaatctgttaatgtggactttactgtggacactaatggggtgtattcagagcctcgccctattggcaccagatacctgactcgtaatctgtaa

SEQ ID NO: 324 - DNA, 3156 bp, Adeno-associated virus
cgattgaatttagcggccgcgaattcgcccttgctgcgtcaacggaccaatgagaactttcccttcaacgattgcgtcgacaagatggtgatctggtgggaggagggaaagatgaccgccaaggtcgtggagtcggccaaagccattctcggaggaagcaaggtgcgtgtggaccaaaagtgcaagtcttcggcccagatcgacccgactcccgtgatcgtcacctccaacaccaacatgtgcgccgtgattgatggaaactcaacgaccttcgagcaccagcagccgttgcaagaccggatgttcaaatttgaacttacccgccgtctggatcatgactttggaaaggtcaccaagcaggaagtgaaagactttttccggtgggcaaaggatcacgtggttgaggtggagcatgagttctacgtcaaaaagggtggagccaaaaaaagacccgcccccagtgacgcagatataagtgagcccaaacgggcgcgcgagtcagttgcgcagccatcgacgtcagacgcggaagcttcgatcaactacgcggacaggtaccaaaacaaatgttctcgtcacgtgggcatgaatctgatgctgtttccctgcagacaatgcgagcgaatgaatcagaattcaaatatctgcttcactcacggacagaaagactgtttagagtgctttcccgtgtcagaatctcaacccgtttctgtcgtcaaaaaggcgtatcagaaactgtgctacattcatcacatcatgggaaaggtgccagacgcttgcactgcttgcgacctggtcaatgtggatttggatgactgcatctctgaacaataaatgatttaaatcaggtatggctgccgatggttatcttccagattggctcgaggacactctctctgaaggaataagacagtggtggaagctcaaacctggcccaccaccaaagcccgcagagcggcataaggacgacagcaggggtcttgtgcttcctggatacaagtacctcggacccttcaacggactcgacaagggagagccggtcaacgaggcagacgccgcggccctcgagcacgacaaggcctacgaccggcagctcgacagcggagacaacccgtacctcaagtacaaccacgccgacgcggagtttcaggagcgccttaaagaagatacgtcttttgggggcaacctcggacgagcagtcttccaggcgaaaaagagggttcttgaacctctgggcctggttgaggaacctgttaagacggctccgggaaaaaagaggcccgtagagcactctcctgtggagccagactcctcctcgggaaccggaaaagcgggcaaccagcctgcaagaaaaagattgaatttcggtcagactggagacgcagactccgtacctgacccccagcctctcggacagccaccagcagccccctctggtctgggaactaatacgatggctacaggcagtggcgcaccaatggcagacaataacgagggcgccgacggagtgggtaattcctcgggagattggcattgcgattccacatggatgggcgacagagtcatcaccaccagcacccgcacctgggccctgcccacctacaacaaccacctctacaagcagatttccagccaatcaggagccagcaatgacaaccactactttggctacagcaccccttgggggtattttgacttcaacagattccactgccacttttcgccacgcgactggcagagactcatcaacaacaactggggattccggcccaaaagactcaacctcaagctgtttaacattcaagtcaaggaggtcacgcagaatgacggtacgacgacgattgccaataaccttaccagcacggttcaggtgtttactgacttggagtaccagctcccgtacgtcctcggctcggcgcatcaaggatgcctcccgccgttcccagcagacgtcttcatggtgccacagtatggatacctcaccctgaacaacgggagtcaggcggtaggacgctcttccttttactgcctggagtactttccttctcagatgcttcgtaccggaaacaactttaccttcagctacacttttgaagacgttcctttccacagcagctacgctcacagtcaaagtctggaccgtctcatgaatcctctcatcgaccagtacctgtattacttgagcagaacaaacactccaagcggaaccactacgcagtccaggcttcagttttctcaggccggagcgagtgacattcgggaccagtctaggaactggcttcctggaccctgttaccgccagcagcgagtatcaaagacagctgcggataacaacaacggtgaatactcgtggactggagctaccaagtaccacctcaatggcagagactctctggtgaatccgggcccggccatggccagccacaaggacgatgaagaaaagttttttcctcaaagcggggttctcatctttgggaagcaaggctcagagaaaacaaatgtggacattgaaaaggtcatgattacagacgaagaggaaatcaggaccaccaatcccgtggctacggagcagtatggttctgtatctaccaacctccagagcggcaacacacgagcagctacctcagatgtcaacacacaaggcgttcttccaggcatggtctggcaggacagagacgtgtacctgcaggggcccatctgggcaaaaattccacacacggacggacattttcacccctctcccctcatgggcggatttggacttaaacaccctcctccacagattctcattaagaataccccggtacctgcgaatccttcgaccaccttcagcgcggcaaagtttgcttccttcatcacacagtattccacggggcaggtcagcgtggagatcgagtgggagctgcagaaggagaacagcaaacgctggaatcccgaaattcagtacacttccaactacaacaaatctgttaatgtggactttactgtggacactaatggggtgtattcagagcctcgccctattggcaccagatacctgactcgtaatctgtaattgcttgttaatcaataaaccgtttaattcgtttcagttgaactttggtctctgcgaagggcgaattcgtttaaacctgcaggactagtccctttagtgag

SEQ ID NO: 325 - protein, 734 aa, Adeno-associated virus
MAADGYLPDWLEDTLSEGIRQWWKLKPGPPPKPAERHKDDSRGLVLPGYKYLGPFNGLDKGEPVNEADAAALEHDKAYDRQLDSGDNPYLKYNHADAEFQERLKEDTSFGGNLGRAVFQAKKRVLEPLGLVEEPVKTAPGKKRPVEHSPVEPDSSSGTGKAGNQPARKRLNFGQTGDADSVPDPQPLGQPPAAPSGLGTNTMATGSGAPMADNNEGADGVGNSSGDWHCDSTWMGDRVITTSTRTWALPTYNNHLYKQISSQSGASNDNHYFGYSTPWGYFDFNRFHCHFSPRDWQRLINNNWGFRPKRLNLKLFNIQVKEVTQNDGTTTIANNLTSTVQVFTDLEYQLPYVLGSAHQGCLPPFPADVFMVPQYGYLTLNNGSQAVGRSSFYCLEYFPSQMLRTGNNFTFSYTFEDVPFHSSYAHSQSLDRLMNPLIDQYLYYLSRTNTPSGTTTQSRLQFSQAGASDIRDQSRNWLPGPCYRQQRVSKTAADNNNGEYSWTGATKYHLNGRDSLVNPGPAMASHKDDEEKFFPQSGVLIFGKQGSEKTNVDIEKVMITDEEEIRTTNPVATEQYGSVSTNLQSGNTRAATSDVNTQGVLPGMVWQDRDVYLQGPIWAKIPHTDGHFHPSPLMGGFGLKHPPPQILIKNTPVPANPSTTFSAAKFASFITQYSTGQVSVEIEWELQKENSKRWNPEIQYTSNYNKSVNVDFTVDTNGVYSEPRPIGTRYLTRNL

SEQ ID NO: 326 - DNA, 2208 bp, Adeno-associated virus
atggctgccgatggttatcttccagattggctcgaggacactctctctgaaggaataagacagtggtggaagctcaaacctggcccaccaccaccaaagcccgcagagcggcataaggacgacagcaggggtcttgtgcttcctgggtacaagtacctcggacccttcaacggactcgacaagggagagccggtcaacgaggcagacgccgcggccctcgagcacgacaaggcctacgaccggcagctcgacagcggagacaacccgtacctcaagtacgaccacgccgacgcggagtttcaggagcgccttaaagaagatacgtcttttgggggcaacctcggacgagcagtcttccaggcaaaaaagagggttcttgaacctctgggcctggttgaggagcctgttaagacggctccgggaaaaaagaggccggtagagcactctcctgtggagccagactcctcctcgggaaccggaaaagcgggcaaccagcctgcaagaaagagattgaatttcggtcagactggagacgcagactccgtacctgacccccagcctctcggacagccaccagcagccccctctggtctgggaactaatacgatggctacaggcagtggcgcaccaatggcagacaataacgatggcgccgacggagtgggtaattcctcgggaaattggcattgcgattccacatggatgggcgacagagtcatcaccaccagcacccgaacctgggctctgcccacctacaacaaccatctgtacaagcagatttccagccaatcaggagccagcaacgacaaccactactttggctacagcaccccttgggggtattttgacttcaacagattccactgccacttttcaccacgtgactggcaaagactcatcaacaacaactggggattccggcccaagagactcaacttcaagctctttaacattcaagtcagagaggtcacgcagaatgatggtacgacgacgattgccaataaccttaccagcacggttcaggtgtttactgactcggagtaccagctcccgtacgtcctcggctcggcgcatcaaggatgcctcccgccgttcccagcagacgtcttcatggtgccacagtatggatacctcaccctgaacaacgggagtcaggcagtaggacgctcttcattttactgcctggagtacttcccttctcagatgctgcgtaccggaaacaactttaccttcagctacacctttgaggatgttcctttccacagcagctacgctcacagccagagtttggaccgtctcatgaatcctctcatcgaccagtacctgtattacttgagcagaacaaacactccaagcggaaccaccacgcagtccaggcttcagttttctcaggccggagcgagtgacattcgggatcagtctaggaactggcttcctggaccctgttaccgccagcagcgagtatcaaagacatctgcggacaacaacaacagtgaatactcgtggattggagctaccaagtaccacctcaatggcagagactctctggtgaatccgggcccggcaatggccagccacaaggacgatgaagaaaagttttttcctcagagcggggttctcatctttggaaaacaaggatcagagaaaacaaatgtggacattgaaaaggtcatgattacagacgaagaggaaatcagaaccaccaatcccgtggccacggagcagtatggttctgtatctaccaacctccagagcggcaacacacaagcatctactgcagatgtcaacacacaaggcgttcttccaggcatggtctggcaggacagagacgtgtacctgcaggggcctatctgggcaaagattccgcacacggacggacattttcacccctctcccctcatgggcggattcggacttaaacaccctcctccacagattctcatcaaaaacaccccggtacctgcgaatccttcgaccaccttcagtgcggcaaagtttgcttccttcatcacacagtattccacggggcgggtcagcgtggagatcgagtgggagctacagaaggagaacagcaaacgctggaatcccgagatccagtacacttccaactacaacaaatctgttaatgtggactttactgtggacactaatggtgtgtattcagagcctcgccccattggcaccagatacctgactcgtaatctgtaa

SEQ ID NO: 327 - protein, 735 aa, Adeno-associated virus
MAADGYLPDWLEDTLSEGIRQWWKLKPGPPPPKPAERHKDDSRGLVLPGYKYLGPFNGLDKGEPVNEADAAALEHDKAYDRQLDSGDNPYLKYDHADAEFQERLKEDTSFGGNLGRAVFQAKKRVLEPLGLVEEPVKTAPGKKRPVEHSPVEPDSSSGTGKAGNQPARKRLNFGQTGDADSVPDPQPLGQPPAAPSGLGTNTMATGSGAPMADNNDGADGVGNSSGNWHCDSTWMGDRVITTSTRTWALPTYNNHLYKQISSQSGASNDNHYFGYSTPWGYFDFNRFHCHFSPRDWQRLINNNWGFRPKRLNFKLFNIQVREVTQNDGTTTIANNLTSTVQVFTDSEYQLPYVLGSAHQGCLPPFPADVFMVPQYGYLTLNNGSQAVGRSSFYCLEYFPSQMLRTGNNFTFSYTFEDVPFHSSYAHSQSLDRLMNPLIDQYLYYLSRTNTPSGTTTQSRLQFSQAGASDIRDQSRNWLPGPCYRQQRVSKTSADNNNSEYSWIGATKYHLNGRDSLVNPGPAMASHKDDEEKFFPQSGVLIFGKQGSEKTNVDIEKVMITDEEEIRTTNPVATEQYGSVSTNLQSGNTQASTADVNTQGVLPGMVWQDRDVYLQGPIWAKIPHTDGHFHPSPLMGGFGLKHPPPQILIKNTPVPANPSTTFSAAKFASFITQYSTGRVSVEIEWELQKENSKRWNPEIQYTSNYNKSVNVDFTVDTNGVYSEPRPIGTRYLTRNL

SEQ ID NO: 328 - DNA, 2217 bp, Adeno-associated virus
atggctgccgatggttatcttccagattggctcgaggacaacctctctgagggcattcgcgagtggtgggacttgaaacctggagccccgaaacccaaagccaaccagcaaaagcaggacgacggccggggtctggtgcttcctggctacaagtacctcggacccttcaacggactcgacaagggggagcccgtcaacgcggcggacgcagcggccctcgagcacgacaaggcctacgaccagcagctcaaagcgggtgacaatccgtacctgcggtataaccacgccgacgccgagtttcaggagcgtctgcaagaagatacgtcttttgggggcaacctcgggcgagcagtcttccaggccaagaagcgggttctcgaacctctcggtctggttgaggaaggcgctaagacggctcctggaaagaagagaccggtagagccatcaccccagcgttctccagactcctctacgggcatcggcaagacaggccagcagcccgcgaaaaagagactcaactttgggcagactggcgactcagagtcagtgcccgaccctcaaccaatcggagaaccccccgcaggcccctctggtctgggatctggtacaatggctgcaggcggtggcgctccaatggcagacaataacgaaggcgccgacggagtgggtagttcctcaggaaattggcattgcgattccgcatggctgggcgacagagtcatcaccaccagcacccgaccctgggccctccccacctacaacaaccacctctacaagcaaatctccaacgggacatcgggaggaagcaccaacgacaacacctacttcggctacagcaccccctgggggtattttgactttaacagattccactgccacttctcaccacgtgactggcagcgactcatcaacaacaactggggattccggcccaagagactcaacttcaagctcttcaacatccaggtcaaggaggtcacgcagaatgaaggcaccaagaccatcgccaataaccttaccagcacgattcaggtctttacggactcggaataccagctcccgtacgtcctcggctctgcgcaccagggctgcccgcctccgttcccggcggacgtcttcatgattcctcagtacgggtacctgactctgaacaacggcagtcaggccgtgggccgttcctccttctactgcctggagtactttccttctcaaatgcggagaacgggcaacaactttgagttcagctaccagtttgaggacgtgccttttcacagcagctacgcgcatagccaaagcctggaccggctgatgaaccccctcatcgaccagtacctgtactacctgtctcggactcagtccacgggaggtaccgcaggaactcagcagttgctattttctcaggccgggcctaataacatgtcggctcaggccaaaaactggctacccgggccctgctaccggcagcaacgcgtctccacgacactgtcgcaaaataacaacagcaactttgcttggaccggtgccaccaagtatcatctgaatggcagagactctctggtaaatcccggtgtcgctatggcaacgcacaaggacgacgaagagcgattttttccatccagcggagtcttgatgtttgggaaacagggagctggaaaagacaacgtggactatagcagcgttatgctaaccagtgaggaagaaatcaaaaccaccaacccagtggccacagaacagtacggcgtggtggccgataacctgcaacagcaaaacgccgctcctattgtaggggccgtcaacagtcaaggagccttacctggcatggtctggcagaaccgggacgtgtacctgcagggtcctatctgggccaagattcctcacacggacggcaactttcatccttcgccgctgatgggaggctttggactgaaacacccgcctcctcagatcctgattaagaatacacctgttcccgcggatcctccaactaccttcagtcaagccaagctggcgtcgttcatcacgcagtacagcaccggacaggtcagcgtggaaattgaatgggagctgcagaaagagaacagcaagcgctggaacccagagattcagtatacttccaactactacaaatctacaaatgtggactttgctgtcaatactgagggtacttattcagagcctcgccccattggcacccgttacctcacccgtaacctgtaa

SEQ ID NO: 329 - protein, 738 aa, Adeno-associated virus
MAADGYLPDWLEDNLSEGIREWWDLKPGAPKPKANQQKQDDGRGLVLPGYKYLGPFNGLDKGEPVNAADAAALEHDKAYDQQLKAGDNPYLRYNHADAEFQERLQEDTSFGGNLGRAVFQAKKRVLEPLGLVEEGAKTAPGKKRPVEPSPQRSPDSSTGIGKTGQQPAKKRLNFGQTGDSESVPDPQPIGEPPAGPSGLGSGTMAAGGGAPMADNNEGADGVGSSSGNWHCDSAWLGDRVITTSTRPWALPTYNNHLYKQISNGTSGGSTNDNTYFGYSTPWGYFDFNRFHCHFSPRDWQRLINNNWGFRPKRLNFKLFNIQVKEVTQNEGTKTIANNLTSTIQVFTDSEYQLPYVLGSAHQGCPPPFPADVFMIPQYGYLTLNNGSQAVGRSSFYCLEYFPSQMRRTGNNFEFSYQFEDVPFHSSYAHSQSLDRLMNPLIDQYLYYLSRTQSTGGTAGTQQLLFSQAGPNNMSAQAKNWLPGPCYRQQRVSTTLSQNNNSNFAWTGATKYHLNGRDSLVNPGVAMATHKDDEERFFPSSGVLMFGKQGAGKDNVDYSSVMLTSEEEIKTTNPVATEQYGVVADNLQQQNAAPIVGAVNSQGALPGMVWQNRDVYLQGPIWAKIPHTDGNFHPSPLMGGFGLKHPPPQILIKNTPVPADPPTTFSQAKLASFITQYSTGQVSVEIEWELQKENSKRWNPEIQYTSNYYKSTNVDFAVNTEGTYSEPRPIGTRYLTRNL

SEQ ID NO: 330 - protein, 735 aa, Adeno-associated virus
MAADGYLPDWLEDTLSEGIRQWWKLKPGPPPPKPAERHKDDSRGLVLPGYKYLGPFNGLDKGEPVNEADAAALEHDKAYDRQLDSGDNPYLKYNHADAEFQERLKEDTSFGGNLGRAVFQAKKRVLEPLGLVEEPVKTAPGKKRPVEHSPVEPDSSSGTGKAGQQPARKRLNFGQTGDADSVPDPQPLGQPPAAPSGLGSTTMATGSGAPMADNNEGADGVGNSSGNWHCDSQWLGDRVITTSTRTWALPTYNNHLYKQISSQSGASNDNHYFGYSTPWGYFDFNRFHCHFSPRDWQRLINNNWGFRPKRLNFKLFNIQVKEVTQNDGTTTIANNLTSTVQVFTDSEYQLPYVLGSAHQGCLPPFPADVFMVPQYGYLTLNNGSQAVGRSSFYCLEYFPSQMLRTGNNFQFSYTFEDVPFHSSYAHSQSLDRLMNPLVDQYLYYLNKTQTNSGTLQQSRLLFSQAGPTNMSLQAKNWLPGPCYRQQRLSKQANDNNNSNFPWTAATKYHLNGRDSLVNPGPAMASHKDDEEKFFPMHGTLIFGKQGTNANDADLENVMITDEEEIRTTNPVATEQYGTVSNNLQNSNTGPTTGTVNHQGALPGMVWQDRDVYLQGPIWAKIPHTDGHFHPSPLMGGFGLKHPPPQIMIKNTPVPANPPTNFSSAKFASFITQYSTGQVSVEIEWELQKENSKRWNPEIQYTSNYNKSVNVDFTVDTNGVYSEPRPIGTRYLTRNL

SEQ ID NO: 331 - DNA, 3158 bp, Adeno-associated virus
gattgaatttagcggccgcgaattcgcccttgctgcgtcaactggaccaatgagaactttcctttcaatgattgcgtcgacaagatggtgatctggtgggaggagggaaagatgaccgccaaggtcgtggagtcggccaaagccattctcggaggaagcaaggtgcgcgcggaccagaaatgcaagtcctcggcccagatagacccgactcccgtgattgtcacctccaacaccaacatgtgcgccgtgattgacgggaactcaacgaccttcgaacaccagcagccgttgcaagaccggatgttcaaatttgaactcacccgccgtctggatcatgactttgggaaggtcaccaagcaggaagtcaaagactttttccggtgggcaaaggatcacgtggttgaggtggagcatgaattctacgtcaaaaagggtggagctaagaaaagacccgcccccagtgacgcagatataagtgagcccaaacgggcgcgcgagtcagttgcgcagccatcgacgtcagacgcggaagcttcgatcaactacgcgggcaggtaccaaaacaaatgttctcgtcacgtgggcatgaatctgatgctgtttccctgcagacaatgcgagagaatgaatcagaattcaaatatctgcttcactcacggacagaaagactgtttagagtgctttcccgtgtcagaatctcaacccgtttctgtcgtcaaaaaggcgtatcagaaactttgctacattcatcatatcatgggaaaggtgccagacgcttgcactgcctgcgatctggtcaatgtggatttggatgactgcatctctgaacaataaatgatttaaatcaggtatggctgccgatggttatcttccagattggctcgaggacactctctctgaaggaataagacagtggtggaagctcaaacctggcccaccaccaccaaagcccgcagagcggcataaggacgacagcaggggtcttgtgcttcctgggtacaagtacctcggacccttcaacggactcgacaagggggagccggtcaacgaggcagacgccgcggccctcgagcacgacaaggcctacgaccggcagctcgacagcggagacaacccgtacctcaagtacaaccacgccgacgcggagtttcaggagcgccttaaagaagatacgtcttttgggggcaacctcggacgagcagtcttccaggcaaaaaagagggttcttgaacctctgggcctggttgaggaacctgttaaaacggctccgggaaaaaagaggccggtagagcactctcctgtggagccagactcctcctcgggaaccggaaaagcgggccagcagcctgcaagaaaaagattgaatttcggtcagactggagacgcagactccgtacctgacccccagcctctcggacagccaccagcagccccctctggtctgggatctactacaatggctacaggcagtggcgcaccaatggcagacaataacgagggtgccgatggagtgggtaattcctcgggaaattggcattgcgattcccaatggctgggcgacagagtcatcaccaccagcacccgcacctgggccctgcccacctacaacaaccacctctacaagcaaatctccagccaatcaggagcctcaaacgacaaccactactttggctacagcaccccctgggggtattttgacttcaacagattccactgccacttttcaccacgtgactggcaaagactcatcaacaacaactggggattccgacccaagagactcaacttcaagctctttaacattcaagtcaaagaggtcacgcagaatgacggtacgacgacgattgccaataaccttaccagcacggttcaggtgtttactgactcggagtaccagctcccgtacgtcctcggctcggcgcatcaaggatgcctcccgccgtttccagcggacgtcttcatggtcccacagtatggatacctcaccctgaacaacgggagtcaggcagtaggacgctcttcattttactgcctggagtactttccttctcagatgctgcgtaccggaaacaactttcaattcagctacacttttgaagacgtgcctttccacagcagctacgctcacagccagagtctggatcggctgatgaatcctctggtcgaccagtacctgtattatctgaacaagacacaaacaaatagtggaactcttcagcagtctcggctactgtttagccaagctggacccaccaacatgtctcttcaagctaaaaactggctgcctggaccttgctacagacagcagcgtctgtcaaagcaggcaaacgacaacaacaacagcaactttccctggactgcagctacaaagtatcatctaaatggccgggactcgttggttaatccaggaccagctatggccagtcacaaggatgacgaagaaaagtttttccccatgcatggaacccttatatttggtaaacaaggaacaaatgccaacgacgcggatttggaaaatgtcatgattacagatgaagaagaaatcaggaccaccaatcccgtggctacggagcagtacggaactgtatcaaataatttgcaaaactcaaacactggtccaactactggaactgtcaatcaccaaggagcgttacctggtatggtgtggcaggatcgagacgtgtacctgcagggacccatttgggccaagattcctcacaccgatggacactttcatccttctccactgatgggaggttttggactcaaacacccacctcctcaaatcatgatcaaaaacactcccgttccagccaatcctcccacaaacttcagttctgccaagtttgcttctttcatcacacagtattccacggggcaggtcagcgtggagatcgagtgggagctgcagaaggagaacagcaaacgctggaatcccgaaattcagtacacttccaactacaacaaatctgttaatgtggactttactgtggacactaatggtgtgtattcagagcctcgccccattggcaccagatacctgactcgtaatctgtaattgcttgttaatcaataaaccgtttaattcgtttcagttgaactttggtctctgcgaagggcgaattcgtttaaacctgcaggactagtccctttagtga

SEQ ID NO: 332 - protein, 735 aa, Adeno-associated virus
MAADGYLPDWLEDTLSEGIRQWWKLKPGPPPPKPAERHKDDSRGLVLPGYKYLGPFNGLDKGEPVNEADAAALEHDKAYDRQLDSGDNPYLKYNHADAEFQERLKEDTSFGGNLGRAVFQAKKRVLEPLGLVEEPVKTAPGKKRPVEHPPVEPDSSSGTGKAGQQPARKRLNFGQTGDADSVPDPQPLGQPPAAPSGLGSTTMATGSGAPMADNNEGADGVGNSSGNWHCDSQWLGDRVITTSTRTWALPTYNNHLYKQISSQSGASNDNHYFGYSTPWGYFDFNRFHCHFSPRDWQRLINNNWGFRPKRLNFKLFNIQVKEVTQNDGTTTIANNLTSTVQVFTDSEYQLPYVLGSAHQGCLPPFPADVFMVPQYGYLTLNNGSQAVGRSSFYCLEYFPSQMLRTGNNFQFSYTFEDVPFHSSYAHSQSLDRLMNPLIDQYLYYLNKTQTNSGTLQQSRLLFSQAGPTNMSLQAKNRLPGPCYRQQRLSKQANDNNNSNFPWTAATKYHLNGRDSLVNPGPAMASHKDDEEKFFPMHGTLIFGKQGTNANDADLENVMITDEEEIRTTNPVATEQYGTVSNNLQNSNTGPTTGTVNHQGALPGMVWQDRDVYLQGPIWAKIPHTDGHFHPSPLVGGFGLKHPPPQIMIKNTPVPANPPTNFSSAKFASFITQYSTGQVSVEIEWELQKENSKRWNPEIQYTSNYNKSVNVDFTVDTNGVYSEPRPIGTRYLTRNL

SEQ ID NO: 333 - DNA, 3159 bp, Adeno-associated virus
gattgaatttagcggccgcgaattcgcccttgctgcgtcaactggaccaatgagaactttcctttcaatgattgcgtcgacaagatggtgatctggtgggaggagggaaagatgaccgccaaggtcgtggagtcggccaaagccattctcggaggaagcaaggtgcgcgtggaccagaaatgcaagtcctcggcccagatagacccgactcccgtgattgtcacctccaacaccgacatgtgcgccgtgattgacgggaactcaacgaccttcgaacaccagcagccgttgcaagaccggatgttcaaatttgaactcacccgccgtctggatcatgactttgggaaggtcaccaagcaggaagtcaaagactttttccggtgggcaaaggatcacgtggttgaggtggagcatgaattctacgtcaaaaagggtggagctaagaaaagacccgcccccagtgacgcagatataagtgagcccaaacgggcgcgcgagtcagttgcgcagccatcgacgtcagacgcggaagcttcgatcaactacgcggacaggtaccaaaacaaatgttctcgtcacgtgggcatgaatctgatgctgtttccctgcagacaatgcgagagaatgaatcagaattcaaatatctgcttcactcacggacagaaagactgtttagagtgctttcccgtgtcagaatctcaacccgtttctgtcgtcaaaaaggcgtatcagaaactttgctacattcatcatatcatgggaaaggtgccagacgcttgcactgcctgcgatctggtcaatgtggatttggatgactgcatctctgaacaataaatgatttaaatcaggtatggctgccgatggttatcttccagattggctcgaggacactctctctgaaggaataagacagtggtggaagctcaaacctggcccaccaccaccaaagcccgcagagcggcataaggacgacagcaggggtcttgtgcttcctgggtacaagtacctcggacccttcaacggactcgacaagggggagccggtcaacgaggcagacgccgcggccctcgagcacgacaaggcctacgaccggcagctcgacagcggagacaacccgtacctcaagtacaaccacgccgacgcggagtttcaggagcgccttaaagaagatacgtcttttgggggcaacctcggacgagcagtcttccaggcaaaaaagagggttcttgaacctctgggcctggttgaggaacctgttaaaacggctccgggaaaaaagaggccggtagagcaccctcctgtggagccagactcctcctcgggaaccggaaaagcgggccagcagcctgcaagaaaaagattgaatttcggtcagactggagacgcagactccgtacctgacccccagcctctcggacagccaccagcagccccctctggtctgggatctactacaatggctacaggcagtggcgcaccaatggcagacaataacgagggtgccgatggagtgggtaattcctcgggaaattggcattgcgattcccaatggctgggcgacagagtcatcaccaccagcacccgcacctgggccctgcccacctacaacaaccacctctacaagcaaatctccagccaatcaggagcctcaaacgacaaccactactttggctacagcaccccctgggggtattttgacttcaacagattccactgccacttttcaccacgtgactggcaaagactcatcaacaacaactggggattccgacccaagagactcaacttcaagctctttaacattcaagtcaaagaggtcacgcagaatgacggtacgacgacgattgccaataaccttaccagcacggttcaggtgtttactgactcggagtaccagctcccgtacgtcctcggctcggcgcatcaaggatgcctcccgccgtttccagcggacgtcttcatggtcccacagtatggatacctcaccctgaacaacgggagtcaggcagtaggacgctcttcattttactgcctggagtactttccttctcagatgctgcgtaccggaaacaactttcagttcagctacacttttgaagacgtgcctttccacagcagctacgctcacagccagagtctggatcggctgatgaatcctctgatcgaccagtacctgtattatctgaacaagacacaaacaaatagtggaactcttcagcagtctcggctactgtttagccaagctggacccaccaacatgtctcttcaagctaaaaaccggctgcctggaccttgctacagacagcagcgtctgtcaaagcaggcaaacgacaacaacaacagcaactttccctggaccgcagctacaaagtatcatctaaatggccgggactcgttggttaatccaggaccagctatggccagtcacaaggatgacgaagaaaagtttttccccatgcatggaacccttatatttggtaaacaaggaacaaatgccaacgacgcggatttggaaaatgtcatgattacagatgaagaagaaatcaggaccaccaatcccgtggctacggagcagtacggaactgtatcaaataatttgcaaaactcaaacactggtccaactactggaactgtcaatcaccaaggagcgttacctggtatggtgtggcaggatcgagacgtgtacctgcagggacccatttgggccaagattcctcacaccgatggacactttcatccttctccactggtgggaggttttggactcaaacacccacctcctcaaatcatgatcaaaaacactcccgttccagccaatcctcccacaaacttcagttctgccaagtttgcttctttcatcacacagtattccacggggcaggtcagcgtggagatcgagtgggagctgcagaaggagaacagcaaacgctggaatcccgaaattcagtacacttccaactacaacaaatctgttaatgtggactttactgtggacactaatggtgtgtattcagagcctcgccccattggcaccagatacctgactcgtaatctgtaattgcttgttaatcaataaaccgtttaattcgtttcagttgaactttggtctctgcgaagggcgaattcgtttaaacctgcaggactagtccctttagtgag

SEQ ID NO: 334 - DNA, 2208 bp, Adeno-associated virus
atggctgccgatggttatcttccagattggctcgaggacactctctctgaaggaataagacagtggtggaagctcaaacctggcccaccaccaccaaagcccgcagagcggcataaggacgacagcaggggtcttgtgcttcctgggtacaagtaccttggacccttcaacggactcgacaagggagagccggtcaacgaggcagacgccgcggccctcgagcacgacaaggcctacgaccggcagctcgacagcggagacaacccgtaccccaagtacaaccacgccgacgcggagttccaggagcgtcttaaagaagatacgtcttttgggggcaacctcggacgagcagtcttccaggcgaaaaagagggttcttgaacctctgggcctggttgaggaacctgttaagacggctccgggaaaaaagaggccggtagagcactctcctgcggagccagactcctcctcgggaaccggaaaagcgggccagcagcctgcaagaaagagattgaatttcggtcagactggagacgcagactccgtacctgacccccagcctctcggacagccaccagcagccccctctggtctgggaactaatacgatggctacaggcagtggcgcaccaatggcagacaataacgagggcgccgacggagtgggtaattcctcgggaaattggcattgcgattccacatggatgggcgacagagtcatcaccaccagcacccgcacctgggctctgcccacctacaacaaccacctctacaagcagatttccagccaatcaggagcctcaaacgacaaccactactttggctacagcaccccttgggggtattttgacttcaacagattccactgccacttttcgccacgtgactggcaaagactcatcaacaacaattggggattccggcccaaaagactcaacttcaagctctttaacattcaagtcaaggaggtcacgcagaatgacggtacgacgacgattgccaataaccttaccagcacggttcaggtgtttactgactcggagtaccagctcccgtacgtcctcggctcggcgcatcaaggatgcctcccgccgttcccagcagacgtcttcatggtgccacagtatggatacctcaccctgaacaacgggagtcaggcagtaggacgctcttcattttactgcctggagtactttccttctcagatgctgcgtaccggaaacaactttaccttcagctacacctttgaggacgttcctttccacagcagctacgcccacagccagagtttggaccgtctcatgaatcctctcatcgaccagtacctgtattacttgagcagaacaaacactccaagcggaaccaccacgcagtcaaggcttcagttttctcaggccggagcaagtgacattcgggaccagtctaggaactggcttcctggaccctgttaccgccagcagcgagtatcaaagacatctgcggataacaacaacagtgaatactcgtggactggagctaccaagtaccaccttaatggaagagactctctggtgaatccgggcccggccatggccagccacaaggacgatgaagaaaagttttttcctcagagcggggttctcatctttggaaaacaagactcgggaaaaactaatgtggacattgaaaaggtcatgattacagacgaagaggaaatcaggaccaccaatcccgtggctacggagcagtatggttctgtatctaccaacctccagagcggcaacacacaagcagctacctcagatgtcaacacacaaggcgttcttccaggcatggtgtggcaggacagagacgtgtacctgcaggggcccatctgggcaaagattccacacacggacggacattttcacccctctcccctcatgggcggattcggacttaaacaccctcccccgcagattctcatcaagaacaccccggtacctgcgaatccttcgactaccttcagtgcggcaaagtttgcttccttcattacacagtactccacggggcaggtcagcgtggagatcgagtgggagctgcagaaggagaacagcaaacgctggaatcccgagattcagtacacttccaactacaacaaatctgttaatgtggactttactgtggacactaatggtgtgtattcagagcctcgccccattggcaccaggtacctgactcgtaatctgtaa

SEQ ID NO: 335 - protein, 735 aa, Adeno-associated virus
MAADGYLPDWLEDTLSEGIRQWWKLKPGPPPPKPAERHKDDSRGLVLPGYKYLGPFNGLDKGEPVNEADAAALEHDKAYDRQLDSGDNPYPKYNHADAEFQERLKEDTSFGGNLGRAVFQAKKRVLEPLGLVEEPVKTAPGKKRPVEHSPAEPDSSSGTGKAGQQPARKRLNFGQTGDADSVPDPQPLGQPPAAPSGLGTNTMATGSGAPMADNNEGADGVGNSSGNWHCDSTWMGDRVITTSTRTWALPTYNNHLYKQISSQSGASNDNHYFGYSTPWGYFDFNRFHCHFSPRDWQRLINNNWGFRPKRLNFKLFNIQVKEVTQNDGTTTIANNLTSTVQVFTDSEYQLPYVLGSAHQGCLPPFPADVFMVPQYGYLTLNNGSQAVGRSSFYCLEYFPSQMLRTGNNFTFSYTFEDVPFHSSYAHSQSLDRLMNPLIDQYLYYLSRTNTPSGTTTQSRLQFSQAGASDIRDQSRNWLPGPCYRQQRVSKTSADNNNSEYSWTGATKYHLNGRDSLVNPGPAMASHKDDEEKFFPQSGVLIFGKQDSGKTNVDIEKVMITDEEEIRTTNPVATEQYGSVSTNLQSGNTQAATSDVNTQGVLPGMVWQDRDVYLQGPIWAKIPHTDGHFHPSPLMGGFGLKHPPPQILIKNTPVPANPSTTFSAAKFASFITQYSTGQVSVEIEWELQKENSKRWNPEIQYTSNYNKSVNVDFTVDTNGVYSEPRPIGTRYLTRNL

SEQ ID NO: 336 - DNA, 2208 bp, Adeno-associated virus
atggctgccgatggttatcttccagattggctcgaggacactctctctgaaggaataagacagtggtggaagctcaaacctggcccaccaccaccaaagcccgcagagcggcataaggacgacagcaggggtcttgtgcttcctgggtacaagtaccttggacccttcaacggactcgacaagggagagccggtcaacgaggcagacgccgcggccctcgagcacgacaaggcctacgaccggcagctcgacggcggagacaacccgtacctcaagtacaaccacgccgacgcggagttccaggagcgtcttaaagaagatacgtcttttgggggcaacctcggacgagcagtcttccaggcgaaaaagagggttcttgaacctctgggcctggttgaggaacctgttaagacggctccgggaaaaaagaggccggtagagcactctcttgcggagccagactcctcctcgggaaccggaaaagcgggccagcagcctgcaagaaggagattgaatttcggtcagactggagacgcagactccgtacctgacccccagcctctcggacagccaccagcagccccctctggtctgggaactaatacgatggctacaggcagtggcgcaccaatggcagacaataacgagggcgccgacggagtgggtaattcctcgggaaattggcattgcgattccacatggatgggcgacagagtcatcaccaccagcacccgcacctgggctctgcccacctacaacaaccacctctacaggcagatttccagccaatcaggagcctcaaacgacaaccactactttggctacagcaccccttgggggtattttgacttcaacagattccactgccacttttcgccacgtgactggcaaagactcatcaacaacaattggggatcccggcccaaaagactcaacttcaagctctttaacattcaagtcaaggaggtcacgcagaatgacggtacgacgacgattgccaataaccttaccagcacggttcaggtgtttactgactcggagtaccagctcccgtacgtcctcggctcggcgcatcaaggatgcctcccgccgttcccagcagacgtcttcatggtgccacagtatggatacctcaccctgaacaacgggagtcaggcagtaggacgctcttcattttactgcctggagtactttccttctcagatgctgcgtaccggaaacaactttaccttcagctacacctttgaggacgttcctttccacagcagctacgcccacagccagagtttggaccgtctcatgaatcctctcgtcgaccagtacctgtattacttgagcagaacaaacactccaagcggaaccaccacgcagtcaaggcttcagttttctcaggccggagcaagtgacattcgggaccagtctaggaactggcttcctggaccctgttaccgccagcagcgagtatcaaagacatctgcggataacaacaacagtgaatactcgtggactggagctaccaagtaccaccttaatggaagagactctctggtgaatccgggcccggccatggccagccacaaggacgatgaagaaaagttttttcctcagagcggggttctcatctttggaaaacaagactcgggaaaaactaatgtggacattgaaaaggtcatgattacagacgaagaggaaatcaggaccaccaatcccgtggctacggagcagtatggttctgtatctaccaacctccagagcggcaacacacaagcagctacctcagatgtcaacacacaaggcgttcttccaggcatggtgtggcaggacagagacgtgtacctgcaggggcccatctgggcaaagattccacacacggacggacattttcacccctctcccctcatgggcggattcggacttaaacaccctcccccgcagattctcatcaagaacaccccggtacctgcgaatccttcgactaccttcagtgcggcaaagtttgcttccttcattacacagtactccacggggcaggtcagcgtggagatcgagtgggagctgcagaaggagaacagcaaacgctggaatcccgagattcagtacacttccaactacaacaaatctgttaatgtggactttactgtggacactaatggtgtgtattcagagcctcgccccattggcaccagatacctgactcgtaatctgtaa

SEQ ID NO: 337 - protein, 735 aa, Adeno-associated virus
MAADGYLPDWLEDTLSEGIRQWWKLKPGPPPPKPAERHKDDSRGLVLPGYKYLGPFNGLDKGEPVNEADAAALEHDKAYDRQLDGGDNPYLKYNHADAEFQERLKEDTSFGGNLGRAVFQAKKRVLEPLGLVEEPVKTAPGKKRPVEHSLAEPDSSSGTGKAGQQPARRRLNFGQTGDADSVPDPQPLGQPPAAPSGLGTNTMATGSGAPMADNNEGADGVGNSSGNWHCDSTWMGDRVITTSTRTWALPTYNNHLYRQISSQSGASNDNHYFGYSTPWGYFDFNRFHCHFSPRDWQRLINNNWGSRPKRLNFKLFNIQVKEVTQNDGTTTIANNLTSTVQVFTDSEYQLPYVLGSAHQGCLPPFPADVFMVPQYGYLTLNNGSQAVGRSSFYCLEYFPSQMLRTGNNFTFSYTFEDVPFHSSYAHSQSLDRLMNPLVDQYLYYLSRTNTPSGTTTQSRLQFSQAGASDIRDQSRNWLPGPCYRQQRVSKTSADNNNSEYSWTGATKYHLNGRDSLVNPGPAMASHKDDEEKFFPQSGVLIFGKQDSGKTNVDIEKVMITDEEEIRTTNPVATEQYGSVSTNLQSGNTQAATSDVNTQGVLPGMVWQDRDVYLQGPIWAKIPHTDGHFHPSPLMGGFGLKHPPPQILIKNTPVPANPSTTFSAAKFASFITQYSTGQVSVEIEWELQKENSKRWNPEIQYTSNYNKSVNVDFTVDTNGVYSEPRPIGTRYLTRNL

SEQ ID NO: 338 - protein, 738 aa, Adeno-associated virus
MAADGYLPDWLEDNLSEGIREWWDLKPGAPKPKANQQKQDDGRGLVLPGYKYLGPFNGLDKGEPVNAADAAALEHDKAYDQQLKAGDNPYLRYNHADAEFQERLQEDTSFGGNLGRAVFQAKKRVLEPLGLVEEAAKTAPGKKRPVEPSPQRSPDSSAGIGKKGQQPAKKRLNFGQTGDSESVPDPQPIGEPPAGPSGLGSGTMAAGGGAPMADNNEGADGVGSSSGNWHCDSTWLGDRVITTSTRTWALPTYNNHLYKQISNGTSGGSTNDNTYFGYSTPWGYFDFNRFHCHFSPRDWQRLINNNWGFRPKRLSFKLFNIQVKEVTQNEGTETIANNLTSTIQVFTDSEYQLPYVLGSAHQGCLPPFPADVFMIPQYGYLTLNNGSQAVGRSSFYCLEYFPSQMLRTGNNFEFSYTFEDVPFHSSCAHSQSSDRLMNPLIDQYLYYLSRTRSTGGTQGTQQLLFSQAGPANMSAQAKNWLPGPCYRQQRVSTTLSQNNNSNFAWTGATKYHLNGRDSLVNPGVAMATHKDDEERFFPSSGVLMFGKQGAGRDNVDYSSVMLTSEEEIKTTNPVATEQYGVVADNLQQTNTGPIVGNVNSQGALPGMVWQNRDVYLQGPIWAKIPHTDGNFHPSPLMGGFGLKHPPPQILIKNTPVPADPPTTFSQAKLASFITQYSTGQVSVEIEWELQKENSKRWNPEIQYTSNYYKSTNVDFAVNTEGTYSEPRPIGTRYLTRNL

SEQ ID NO: 339 - DNA, 2217 bp, Adeno-associated virus
atggctgctgacggttatcttccagattggctcgaggacaacctctctgagggcattcgcgagtggtgggacctgaaacctggagcccccaagcccaaggccaaccagcagaagcaggacgacggccggggtctggtgcttcttggctacaagtacctcggacccttcaacggactcgacaagggggagcccgtcaatgcggcggacgcagcggccctcgagcacgacaaggcctacgaccagcagctcaaagcgggtgacaatccgtacctgcggtataaccacgccgacgccgagtttcaggagcgtctgcaagaagatacgtcttttgggggcaacctcgggcgagcagtcttccaggccaagaagcgggttctcgaacctctcggtctggttgaggaagctgctaagacggctcctggaaagaagagaccggtagaaccgtcacctcagcgttcccccgactcctccacgggcatcggcaagaaaggccagcagcccgctaaaaagagactgaactttggtcagactggcgactcagagtcagtccccgaccctcaaccaatcggagaaccaccagcaggcccctctggtctgggatctggtacaatggctgcaggcggtggcgctccaatggcagacaataacgaaggcgccgacggagtgggtagttcctcaggaaattggcattgcgattccacatggctgggcgacagagtcatcaccaccagcacccgaacctgggccctgcccacctacaacaaccacctctacaagcaaatatccaatgggacatcgggaggaagcaccaacgacaacacctacttcggctacagcaccccctgggggtattttgacttcaacagattccactgccacttctcaccacgtgactggcagcgactcatcaacaacaactggggattccggccaaaaagactcagcttcaagctcttcaacatccaggtcaaggaggtcacgcagaatgaaggcaccaagaccatcgccaataaccttaccagcacgattcaggtatttacggactcggaataccagctgccgtacgtcctcggctccgcgcaccagggctgcctgcctccgttcccggcggacgtcttcatgattccccagtacggctaccttacactgaacaatggaagtcaagccgtaggccgttcctccttctactgcctggaatattttccatctcaaatgctgcgaactggaaacaattttgaattcagctacaccttcgaggacgtgcctttccacagcggctacgcacacagccagagcttggaccgactgatgaatcctctcatcgaccagtacctgtactacttatccagaactcagtccacaggaggaactcaaggtacccagcaattgttattttctcaagctgggcctgcaaacatgtcggctcaggctaagaactggctacctggaccttgctaccggcagcagcgagtctctacgacactgtcgcaaaacaacaacagcaactttgcttggactggtgccaccaaatatcacctgaacggaagagactctttggtaaatcccggtgtcgccatggcaacccacaaggacgacgaggaacgcttcttcccgtcgagtggagtcctgatgtttggaaaacagggtgctggaagagacaatgtggactacagcagcgttatgctaaccagcgaagaagaaattaaaaccactaaccctgtagccacagaacaatacggtgtggtggctgacaacttgcagcaaaccaatacagggcctattgtgggaaatgtcaacagccaaggagccttacctggcatggtctggcagaaccgagacgtgtacctgcagggtcccatctgggccaagattcctcacacggacggcaacttccacccttcaccgctaatgggaggatttggactgaagcacccacctcctcagatcctgatcaagaacacgccggtacctgcggatcctccaacgacgttcagccaggcgaaattggcttccttcattacgcagtacagcaccggacaggtcagcgtggaaatcgagtgggagctgcagaaggagaacagcaaacgctggaacccagagattcagtacacttcaaactactacaaatctacaaatgtggactttgctgtcaatacagagggaacttattctgagcctcgccccattggtactcgttacctcacccgtaatctgtaa

SEQ ID NO: 340 - protein, 738 aa, Adeno-associated virus
MAADGYLPDWLEDNLSEGIREWWDLKPGAPKPKANQQKQDDGRGLVLLGYKYLGPFNGLDKGEPVNAADAAALEHDKAYDQQLKAGDNPYLRYNHADAEFQERLQEDTSFGGNLGRAVFQAKKRVLEPLGLVEEAAKTAPGKKRPVEPSPQRSPDSSTGIGKKGQQPAKKRLNFGQTGDSESVPDPQPIGEPPAGPSGLGSGTMAAGGGAPMADNNEGADGVGSSSGNWHCDSTWLGDRVITTSTRTWALPTYNNHLYKQISNGTSGGSTNDNTYFGYSTPWGYFDFNRFHCHFSPRDWQRLINNNWGFRPKRLSFKLFNIQVKEVTQNEGTKTIANNLTSTIQVFTDSEYQLPYVLGSAHQGCLPPFPADVFMIPQYGYLTLNNGSQAVGRSSFYCLEYFPSQMLRTGNNFEFSYTFEDVPFHSGYAHSQSLDRLMNPLIDQYLYYLSRTQSTGGTQGTQQLLFSQAGPANMSAQAKNWLPGPCYRQQRVSTTLSQNNNSNFAWTGATKYHLNGRDSLVNPGVAMATHKDDEERFFPSSGVLMFGKQGAGRDNVDYSSVMLTSEEEIKTTNPVATEQYGVVADNLQQTNTGPIVGNVNSQGALPGMVWQNRDVYLQGPIWAKIPHTDGNFHPSPLMGGFGLKHPPPQILIKNTPVPADPPTTFSQAKLASFITQYSTGQVSVEIEWELQKENSKRWNPEIQYTSNYYKSTNVDFAVNTEGTYSEPRPIGTRYLTRNL

SEQ ID NO: 341 - protein, 735 aa, Adeno-associated virus
MAADGYLPDWLEDTLSEGIRQWWKLKPGPPPPKPAERHKDDSRGLVLPGYKYLGPFNGLDKGEPVNEADAAALEHDKAYDRQLDSGDNPYLKYNHADAEFQERLKEDTSFGGNLGRAVFQAKKRVLEPLGLVEPPVKTAPGKKRPVEHSPAEPDSSSGTGKAGQQPARKRLNFGQTGDADSVPDPQPLGQPPAAPSGLGSTTMATGSGAPMADNNEGADGVGNSSGNWHCDSQWLGDRVITTSTRTWALPTYNNHLYKQISSQSGASNDNHYFGYSTPWGYFDFNRFHCHFSPRDWQRLINNNWGFRPKRLNFKLFNIQVKEVTQNDGTTTIANNLTSTVQVFTDSEYQLPYVLGSAHQGCLPPFPADVFMVPQYGYLTLNNGSQAVGRSSFYCLEYFPSQMLRTGNNFQFSYTFEDVPFHSSYAHSQSLDRLMNPLIDQYLYYLNKTQSNSGTLQQSRLLFSQAGPTSMSLQAKNWLPGPCYRQQRLSKQANDNNNSNFPWTAATKYHLNGRDSLVNPGPAMASHKDDEEKFFPMHGTLIFGKQGTNANDADLDNVMITDEEEIRTTNPVATEQYGYVSNNLQNSNTGPTTGTVNHQGALPGMVWQDRDVYLQGPIWAKIPHTDGHFHPSPLMGGFGLKHPPPQIMIKNTPVPANPPTNFSSAKFASFITQYSTGQVSVEIEWELQKENSKRWNPEIQYTSNYNKSVNVDFTVDTNGVYSEPRPIGTRYLTRNL

SEQ ID NO: 342 - protein, 735 aa, Adeno-associated virus
MAADGYLPDWLEDTLSEGIRQWWKLKPGPPPPKPAERHKDDSRGLVLPGYKYLGPFNGLDKGEPVNEADAAALEHDKAYDRQLDSGDNPYLKYNHADAEFQERLKEDTSFGGNLGRAVFQAKKRVLEPLGLVEGPVKTAPGKKRPVEHSPAEPDSSSGTGKAGQQPARKRLNFGQTGDADSVPDPQPLGQPPAAPSGLGSTTMATGSGAPMADNNEGADGVGNSSGNWHCDSQWLGDRVITTSTRTWALPTYNNHLYKQISSQSGASNDNHYFGYSTPWGYFDFNRFHCHFSPRDWQRLINNNWGFRPKRLNFKLFNIQVKEVTQNDGTTTIANNLTSTVQVFTDSEYQLPYVLGSAHQGCLPPFPADVFMVPQYGYLTLNNGSQAVGRSSFYCLEYFPSQMLRTGNNFQFSYTFEDVPFHSSYAHSQSLDRLMNPLIDQYLYYLNKTQSNSGTLQQSRLLFSQAGPTSMSLQAKNWLPGPCYRQQRLSKQANDNNNSNFPWTAATKYHLNGRDSLVNPGPAMASHKDDEEKFFPMHGTLIFGKQGTNANDADLDNVMITDEEEIRTTNPVATEQYGYVSNNLQNSNTGPTTGTVNHQGALPGMVWQDRDVYLQGPIWAKIPHTDGHFHPSPLMGGFGLKHPPPQIMIKNTPVPANPPTNFSSAKFASFITQYSTGQVSVEIEWELQKENSKRWNPEIQYTSNYNKSVNVDFTVDTNGVYSEPRPIGTRYLTRNL

SEQ ID NO: 343 - DNA, 2208 bp, Adeno-associated virus
atggctgccgatggttatcttccagattggctcgaggacactctctctgaaggaataagacagtggtggaagctcaaacctggcccaccaccaccaaagcccgcagagcggcataaggacgacagcaggggtcttgtgcttcctgggtacaagtacctcggacccttcaacggactcgacaagggggagccggtcaacgaggcagacgccgcggccctcgagcacgacaaggcctacgaccggcagctcgacagcggagacaacccgtacctcaagtacaaccacgccgacgcggagtttcaggagcgtcttaaagaagatacgtcttttgggggcaacctcggacgagcagtcttccaggcgaaaaagagggttcttgaacctctgggcctggttgagggacctgttaagacggctccgggaaaaaagaggccggtagagcactctcctgcggagccagactcctcctcgggaaccggaaaagcgggccagcagcctgcaagaaaaagattgaattttggtcagactggagacgcagactccgtacctgacccccagcctctcggacagccaccagcagccccctctggtttgggatctactacaatggctacaggcagtggcgcaccaatggcagacaataacgagggtgccgatggagtgggtaattcctcaggaaattggcattgcgattcccaatggctgggcgacagagtcatcaccaccagcacccgaacctgggccctgcccacctacaacaaccacctctacaagcaaatctcaagccaatcaggagcctcaaacgacaaccactactttggctacagcaccccttgggggtattttgacttcaacagattccactgccacttttcaccacgtgactggcaaagactcatcaacaacaactggggattccgacccaagagactcaacttcaagctctttaacattcaagtcaaagaggtcacgcagaatgacggtacgacgacgattgccaataaccttaccagcacggttcaggtgtttactgactcggagtaccagctcccgtacgtcctcgggtcggcgcatcaaggatgcctcccgccgtttccagcggacgtcttcatggtcccacagtatggatacctcaccctgaacaacgggagtcaggcggtaggacgctcttccttttactgcctggagtactttccttctcagatgcttcgtactggaaacaactttcagttcagctacacctttgaagacgttcctttccacagcagctacgctcacagccagagtctggatcggctgatgaatcctctgatcgaccagtacctgtattatctgaacaaaacacaatcaaatagtggaactcttcagcagtctcggctactgtttagtcaagctggacccaccagcatgtctcttcaagctaaaaactggctacctggaccttgctacagacagcagcgtctgtcaaagcaggcaaacgacaacaacaacagcaactttccctggactgcggctacaaagtatcacctaaatggccgggactcgttggttaatccaggaccagctatggccagtcacaaagacgatgaagaaaagtttttccccatgcatggaaccctgatatttggtaaacaaggaacaaatgctaacgacgcggatttggacaatgtcatgattacagatgaagaagaaatccgcaccaccaatcccgtggctacggagcagtacggatatgtgtcaaataatttgcaaaactcaaatactggtccaactactggaactgtcaatcaccaaggagcgttacctggcatggtgtggcaggatcgagacgtgtacctgcagggacccatttgggccaagattcctcacaccgatggacactttcatccttctccactgatgggaggttttgggctcaaacacccgcctcctcagatcatgatcaaaaacactcccgttccagccaatcctcccacaaacttcagttctgccaagtttgcttctttcatcacacagtattccacggggcaggtcagcgtggagatcgagtgggagctgcagaaagagaacagcaaacgctggaatcccgaaattcagtacacttccaactacaacaaatctgttaatgtggactttactgtggacactaatggcgtgtattcagagcctcgccccattggcaccagatacctgactcgtaatctgtaa

SEQ ID NO: 344 - DNA, 2211 bp, Adeno-associated virus; identical to SEQ ID NO: 25

SEQ ID NO: 345 - DNA, 2208 bp, Adeno-associated virus
atggctgccgatggttatcttccagattggctcgaggacactctctctgaaggaacaagacagtggtggaagctcaaacctggcccaccaccaccaaagcccgcagagcggcataaggacgacagcaggggtcttgtgcttcctgggtacaagtacctcggacccttcaacggactcgacaagggggagccggtcaacgaggcagacgccgcggccctcgagcacgacaaggcctacgaccggcagctcgacagcggagacaacccgtacctcaagtacaaccacgccgacgcggagtttcaggagcgtcttaaagaagatacgtcttttgggggcaacctcggacgagcagtcttccaggcgaaaaagagggttcttgaacctctgggcctggttgaggaacctgttaagacggctccgggaaaaaagaggccggtagagcactctcctgcggagccagactcctcctcgggaaccggaaaagcgggccagcagcctgcaagaaaaagattgaattttggtcagactggagacgcagactccgtacctgacccccagcctctcggacagccaccagcagccccctctggtttgggatctactacaatggctacaggcagtggcgcaccaatggcagacaataacgagggtgccgatggagtgggtaattcctcaggaaattggcattgcgattcccaatggctgggcgacagagtcatcaccaccagcacccgaacctgggccctgcccacctacaacaaccacctctacaagcaaatctcaagccaatcaggagcctcaaacgacaaccactactttggctacagcaccccttgggggtattttgacttcaacagattccactgccacttttcaccacgtgactggcaaagactcatcaacaacaactggggattccgacccaagagactcaacttcaagctctttaacattcaagtcaaagaggtcacgcagaatgacggtacgacgacgattgccaataaccttaccagcacggttcaggtgtttactgactcggagtaccagctcccgtacgtcctcgggtcggcgcatcaaggatgcctcccgccgtttccagcggacgtcttcatggtcccacagtatggatacctcaccctgaacaacgggagtcaggcggtaggacgctcttccttttactgcctggagtactttccttctcagatgcttcgtactggaaacaactttcagttcagctacacctttgaagacgttcctttccacagcagctacgctcacagccagagtctggatcggctgatgaatcctctgatcgaccagtacctgtattatctgaacaaaacacaatcaaatagtggaactcttcagcagtctcggctactgtttagtcaagctggacccaccagcatgtctcttcaagctaaaaactggctacctggaccttgctacagacagcagcgtctgtcaaagcaggcaaacgacaacaacaacagcaactttccctggactgcggctacaaagtaccacctaaatggccgggactcgttggttaatccaggaccagctatggccagtcacaaagacgatgaagaaaagtttttccccatgcatggaaccctgatatttggtaaacaaggaacaaatgctaacgacgcggatttggacaatgtcatgattacagatgaagaagaaatccgcaccaccaatcccgtggctacggagcagtacggatatgtgtcaaataatttgcaaaactcaaatactggtccaactactggaactgtcaatcaccaaggagcgttacctggcatggtgtggcaggatcgagacgtgtacctgcagggacccatttgggccaagattcctcacaccgatggacactttcatccttctccactgatgggaggttttgggctcaaacacccgcctcctcagatcatgatcaaaaacactcccgttccagccaatcctcccacaaacttcagttctgccaagtttgcttctttcatcacacagtattccacggggcaggtcagcgtggagatcgagtgggagctgcagaaagagaacagcaaacgctggaatcccgaaattcagtacacttccaactacaacaaatctgttaatgtggactttactgtggacactaatggcgtgtattcagagcctcgccccattggcaccagatacctgactcgtaatctgtaa

SEQ ID NO: 346 - DNA, 2217 bp, Adeno-associated virus
atggctgctgacggttatcttccagattggctcgaggacaacctctctgagggcattcgcgagtggtgggacctgaaacctggagcccccaagcccaaggccaaccagcagaagcaggacgacggccggggtctggtgcttcctggctacaagtacctcggacccttcaacggactcgacaagggggagcccgtcaacgcggcggacgcagcggccctcgagcacgacaaggcctacgaccagcagctcaaagcgggtgacaatccgtacctgcggtataaccacgccgacgccgagtttcaggagcgtctgcaagaagatacgtcttttgggggcaacctcgggcgagcagtcttccaggccaagaagcgggttctcgaacctctcggtctggttgaggaagctgctaagacggctcctggaaagaagagaccggtagaaccgtcacctcagcgttcccccgactcctccacgggcatcggcaagaaaggccagcagcccgctaaaaagagactgaactttggtcagactggcgactcagagtcagtccccgaccctcaaccaatcggagaaccacctgcaggcccctctggtctgggatctggtacaatggctgcaggcggtggcgctccaatggcagacaataacgaaggcgccgacggagtgggtagttcctcaggaaattggcattgcgattccacatggctgggcgacagagtcatcaccaccagcacccgaacctgggccctgcccacctacaacaaccacctctacaagcaaatatccaatgggacatcgggagggagcaccaacgacaacacctacttcggctacagcaccccctgggggtattttgacttcaacagattccactgccacttctcaccacgtgactggcagcgactcatcaacaacaactggggattccggccaaaaagactcagcttcaagctcttcaacatccaggtcaaggaggtcacgcagaatgaaggcaccaagaccatcgccaataaccttaccagcacgattcaggtatttacggactcggaataccagctgccgtacgtcctcggctccgcgcaccagggctgcctgcctccgttcccggcggacgtcttcatgattccccagtacggctaccttacactgaacaatggaagtcaagccgtaggccgttcctccttctactgcctggaatattttccatctcaaatgctgcgaactggaaacaattttgaattcagctacaccttcgaggacgtgcctttccacagcagctacgcacacagccagagcttggaccgactgatgaatcctctcatcgaccagtacctgtactacttatccagaactcagtccacaggaggaactcaaggtacccagcaattgttattttctcaagctgggcctgcaaacatgtcggctcaggctaagaactggctacctggaccttgctaccggcagcagcgagtctctacgacactgtcgcaaaacaacaacagcaactttgcttggactggtgccaccaaatatcacctgaacggaagagactctttggtaaatcccggtgtcgccatggcaacccacaaggacgacgaggaacgcttcttcccgtcgagtggagtcctgatgtttggaaaacagggtgctggaagagacaatgtggactacagcagcgttatgctaaccagcgaagaagaaattaaaaccactaaccctgtagccacagaacaatacggtgtggtggctgacaacttgcagcaaaccaatacagggcctattgtgggaaatgtcaacagccaaggagccttacctggcatggtctggcagaaccgagacgtgtacctgcagggtcccatctgggccaagattcctcacacggacggcaactgccacccttcaccgctaatgggaggatttggactgaagcacccacctcctcagatcctgatcaagaacacgccggtacctgcggatcctccaacaacgttcagccaggcgaaattggcttccttcattacgcagtacagcaccggacaggtcagcgtggaaatcgagtgggagctgcagaaggagaacagcaaacgctggaacccagagattcagtacacttcaaactactacaaatctacaaatgtggactttgctgtcaatacagagggaacttattctgagcctcgccccattggtactcgttacctcacccgtaatctgtaa

SEQ ID NO: 347 - protein, 735 aa, Adeno-associated virus
MAADGYLPDWLEDTLSEGTRQWWKLKPGPPPPKPAERHKDDSRGLVLPGYKYLGPFNGLDKGEPVNEADAAALEHDKAYDRQLDSGDNPYLKYNHADAEFQERLKEDTSFGGNLGRAVFQAKKRVLEPLGLVEEPVKTAPGKKRPVEHSPAEPDSSSGTGKAGQQPARKRLNFGQTGDADSVPDPQPLGQPPAAPSGLGSTTMATGSGAPMADNNEGADGVGNSSGNWHCDSQWLGDRVITTSTRTWALPTYNNHLYKQISSQSGASNDNHYFGYSTPWGYFDFNRFHCHFSPRDWQRLINNNWGFRPKRLNFKLFNIQVKEVTQNDGTTTIANNLTSTVQVFTDSEYQLPYVLGSAHQGCLPPFPADVFMVPQYGYLTLNNGSQAVGRSSFYCLEYFPSQMLRTGNNFQFSYTFEDVPFHSSYAHSQSLDRLMNPLIDQYLYYLNKTQSNSGTLQQSRLLFSQAGPTSMSLQAKNWLPGPCYRQQRLSKQANDNNNSNFPWTAATKYHLNGRDSLVNPGPAMASHKDDEEKFFPMHGTLIFGKQGTNANDADLDNVMITDEEEIRTTNPVATEQYGYVSNNLQNSNTGPTTGTVNHQGALPGMVWQDRDVYLQGPIWAKIPHTDGHFHPSPLMGGFGLKHPPPQIMIKNTPVPANPPTNFSSAKFASFITQYSTGQVSVEIEWELQKENSKRWNPEIQYTSNYNKSVNVDFTVDTNGVYSEPRPIGTRYLTRNL

SEQ ID NO: 348 - DNA, 2208 bp, Adeno-associated virus
atggctgccgatggttatcttccagattggctcgaggacactctctctgaaggaataagacagtggtggaagctcaaacctggcccaccaccaccaaagcccgcagagcggcatcaggacaacagcaggggtcttgtgcttcctgggtacaagtacctcggaccctccaacggactcgacaaaggagagccggtcaacgaggcagacgccgcggccctcgagcacgacaaggcctacgaccggcagctcgacagcggagacaacccgtacctcaagtacaaccacgccgacgcggagtttcaggagcgtcttaaagaagatacgtcttttgggggcaacctcggacgagcagtcttccaggcgaaaaagagggttcttgaacctctgggcctggttgaggaacctgttaagacggctccgggaaaaaagaggccggtagagcactctcctgtggagccagactcctcctcgggaaccggaaaagcgggccatcagcctgcgagaaagagattgaattttggtcagactggagacgcagactccgtacctgacccccagcctctcggacagccaccagcagcccccacaagtttgggatctactacaatggctacaggcagtggcgcaccaatggcagacaataacgagggtgccgatggagtgggtaattcctcaggaaattggcattgcgattcccaatggctgggcgacagagtcatcaccaccagcacccgaacctgggccctgcccacctacaacaaccacctctacaagcaaatctccagccaatcaggagcctcgaacgacaaccactactttggctgcagcaccccctgggggtattttgacttcaacagattccactgtcacttctccccacgtgattggcaaagactcatcaacaacaactggggattccgacccaagagactcaacttcaagctctttaacattcaagtcaaagaggtcacgcagaatgacggtacgacgacgattgccaataaccttaccagcacggttcaggtgtttactgactcggagtacccgctcccgtacgtcctcggctcggcgcatcaaggatgcctcccgccgtttccagcggacgtcttcatggtcccacagtatggatacctcaccctgaacaacgggagtcaggcggtaggacgctcttccttttactgcctggagtactttccttctcagatgctgcgtaccggaaacaactttaccttcagctacacctttgaggacgttcctttccacagcagctacgctcacagccagagtttggaccggctgatgaatcctctgatcgaccagtatctatattatctgaacaggacacaatcaaatagtggaactcttcagcagtctaggctactgtttagccaagctggacccaccagcatgtctcttcaagctaaaaactggctgcctggaccttgctacagacagcagcgtctttcaaagcaggcaaacgacaacaacaacagcaactttccctggactgcggctacaaagtatcatctaaatggccgggactcgttggttaatccaggaccagctatggccagccacaaagacgatgaagaaaagtttttccccatgcatggaaccctgatatttggtaaacaaggaacaaatgctaacgacgcggatttggagcatgttatgattacagatgaagaagaaatcaggaccaccaatcctgtggctacagagcagtacggaaacgtgtcaaataatttgcaaaactcaaatactggtccaactacagaaaatgtcaatcaccagggagcgttacctggtatggtgtggcaggatcgagacgtgtacctgcagggacccatttgggccaagattcctcacaccgacggacactttcacccttctccactgatgggaggttttggactcaaacacccgcctcctcaaatcatgatcaaaaacactcccgttccagccaatcctcccacaaacttcagttctgccaagtttgcttctttcatcacacagtattccacgggccaggtcagcgtggagattgagtgggagctgcagaaggagaacagcaaacgctggaaccccgagatccagtatacttccaactacaacaaatctgttaatgtggactttactgtggacactaatggtgtgtattcagagccttgccccattggcaccagatacctgactcgtaatctgtaa

SEQ ID NO: 349 - protein, 735 aa, Adeno-associated virus
MAADGYLPDWLEDTLSEGIRQWWKLKPGPPPPKPAERHQDNSRGLVLPGYKYLGPSNGLDKGEPVNEADAAALEHDKAYDRQLDSGDNPYLKYNHADAEFQERLKEDTSFGGNLGRAVFQAKKRVLEPLGLVEEPVKTAPGKKRPVEHSPVEPDSSSGTGKAGHQPARKRLNFGQTGDADSVPDPQPLGQPPAAPTSLGSTTMATGSGAPMADNNEGADGVGNSSGNWHCDSQWLGDRVITTSTRTWALPTYNNHLYKQISSQSGASNDNHYFGCSTPWGYFDFNRFHCHFSPRDWQRLINNNWGFRPKRLNFKLFNIQVKEVTQNDGTTTIANNLTSTVQVFTDSEYPLPYVLGSAHQGCLPPFPADVFMVPQYGYLTLNNGSQAVGRSSFYCLEYFPSQMLRTGNNFTFSYTFEDVPFHSSYAHSQSLDRLMNPLIDQYLYYLNRTQSNSGTLQQSRLLFSQAGPTSMSLQAKNWLPGPCYRQQRLSKQANDNNNSNFPWTAATKYHLNGRDSLVNPGPAMASHKDDEEKFFPMHGTLIFGKQGTNANDADLEHVMITDEEEIRTTNPVATEQYGNVSNNLQNSNTGPTTENVNHQGALPGMVWQDRDVYLQGPIWAKIPHTDGHFHPSPLMGGFGLKHPPPQIMIKNTPVPANPPTNFSSAKFASFITQYSTGQVSVEIEWELQKENSKRWNPEIQYTSNYNKSVNVDFTVDTNGVYSEPCPIGTRYLTRNL

SEQ ID NO: 350 - DNA, 2214 bp, Artificial Sequence
  Description of Artificial Sequence: Synthetic polynucleotide
atggctgccgatggttatcttccagattggctcgaggacaaccttagtgaaggaattcgcgagtggtgggctttgaaacctggagcccctcaacccaaggcaaatcaacaacatcaagacaacgctcgaggtcttgtgcttccgggttacaaataccttggacccggcaacggactcgacaagggggagccggtcaacgcagcagacgcggcggccctcgagcacgacaaggcctacgaccagcagctgcaggcgggtgacaatccgtacctgcggtataaccacgccgacgccgagtttcaggagcgtctgcaagaagatacgtcttttgggggcaaccttggcagagcagtcttccaggccaaaaagaggatccttgagcctcttggtctggttgaggaagcagctaaaacggctcctggaaagaagaggcctgtagatcagtctcctcaggaaccggactcatcatctggtgttggcaaatcgggcaaacagcctgccagaaaaagactaaatttcggtcagactggcgactcagagtcagtcccagaccctcaacctctcggagaaccaccagcagcccccacaagtttgggatctaatacaatggcttcaggcggtggcgcaccaatggcagacaataacgagggtgccgatggggtgggtagttcctcgggaaattggcattgcgattcccaatggctgggggacagagtcatcaccaccagcacccgaacctgggccctgcccacctacaacaatcacctctacaagcaaatctccaacgggacatcgggaggagccaccaacgacaacacctacttcggctacagcaccccctgggggtattttgactttaacagattccactgccacttttcaccacgtgactggcagcgactcatcaacaacaactggggattccggcccaagagactcagcttcaagctcttcaacatccaggtcaaggaggtcacgcagaatgaaggcaccaagaccatcgccaataacctcaccagcaccatccaggtgtttacggactcggagtaccagctgccgtacgttctcggctctgcgcaccagggctgcctccctccgttcccggcggacgtgttcatgattccgcaatacggctacctgacgctcaacaatggcagccaagccgtgggacgttcatccttttactgcctggaatatttcccttctcagatgctgagaacgggcaacaactttaccttcagctacacctttgaggaagtgcctttccacagcagctacgcgcacagccagagcttggaccggctgatgaatcctctgattgaccagtacctgtactacttgtctcggactcaaacaacaggaggcacggcaaatacgcagactctgggcttcagccaaggtgggcctaatacaatggccaatcaggcaaagaactggctgccaggaccctgttaccgccaacaacgcgtctcaacgacaaccgggcaaaacaacaatagcaactttgcctggactgctgggaccaaataccatctgaatggaagaaattcattggctaatcctggcatcgctatggcaacacacaaagacgacgaggagcgtttttttcccagtaacgggatcctgatttttggcaaacaaaatgctgccagagacaatgcggattacagcgatgtcatgctcaccagcgaggaagaaatcaaaaccactaaccctgtggctacagaggaatacggtatcgtggcagataacttgcagcagcaaaacacggctcctcaaattggaactgtcaacagccagggggccttacccggtatggtctggcagaaccgggacgtgtacctgcagggtcccatctgggccaagattcctcacacggacggcaacttccacccgtctccgctgatgggcggctttggcctgaaacatcctccgcctcagatcctgatcaagaacacgcctgtacctgcggatcctccgaccaccttcaaccagtcaaagctgaactctttcatcacgcaatacagcaccggacaggtcagcgtggagatcgagtgggagctgcagaaggaaaacagcaagcgctggaacccggagatccagtacacttccaactattacaagtctaataatgttgaatttgctgttaatactgaaggtgtatatagtgaaccccgccccattggcaccagatacctgactcgtaatctgtaa

SEQ ID NO: 351 - protein, 737 aa, Artificial Sequence
  Description of Artificial Sequence: Synthetic polypeptide
MAADGYLPDWLEDNLSEGIREWWALKPGAPQPKANQQHQDNARGLVLPGYKYLGPGNGLDKGEPVNAADAAALEHDKAYDQQLQAGDNPYLRYNHADAEFQERLQEDTSFGGNLGRAVFQAKKRILEPLGLVEEAAKTAPGKKRPVDQSPQEPDSSSGVGKSGKQPARKRLNFGQTGDSESVPDPQPLGEPPAAPTSLGSNTMASGGGAPMADNNEGADGVGSSSGNWHCDSQWLGDRVITTSTRTWALPTYNNHLYKQISNGTSGGATNDNTYFGYSTPWGYFDFNRFHCHFSPRDWQRLINNNWGFRPKRLSFKLFNIQVKEVTQNEGTKTIANNLTSTIQVFTDSEYQLPYVLGSAHQGCLPPFPADVFMIPQYGYLTLNNGSQAVGRSSFYCLEYFPSQMLRTGNNFTFSYTFEEVPFHSSYAHSQSLDRLMNPLIDQYLYYLSRTQTTGGTANTQTLGFSQGGPNTMANQAKNWLPGPCYRQQRVSTTTGQNNNSNFAWTAGTKYHLNGRNSLANPGIAMATHKDDEERFFPSNGILIFGKQNAARDNADYSDVMLTSEEEIKTTNPVATEEYGIVADNLQQQNTAPQIGTVNSQGALPGMVWQNRDVYLQGPIWAKIPHTDGNFHPSPLMGGFGLKHPPPQILIKNTPVPADPPTTFNQSKLNSFITQYSTGQVSVEIEWELQKENSKRWNPEIQYTSNYYKSNNVEFAVNTEGVYSEPRPIGTRYLTRNL

SEQ ID NO: 352 - DNA, 2211 bp, Artificial Sequence
  Description of Artificial Sequence: Synthetic polynucleotide
atggctgccgatggttatcttccagattggctcgaggacaacctctctgagggcattcgcgagtggtgggacttgaaacctggagccccgaagcccaaagccaaccagcaaaagcaggacgacggccggggtctggtgcttcctggctacaagtacctcggacccttcaacggactcgacaagggggagcccgtcaacgcggcggacgcagcggccctcgagcacgacaaggcctacgaccagcagctcaaagcgggtgacaatccgtacctgcggtataaccacgccgacgccgagtttcaggagcgtctgcaagaagatacgtcttttgggggcaacctcgggcgagcagtcttccaggccaagaagcgggttctcgaacctctcggtctggttgaggaaggcgctaagacggctcctggaaagaaacgtccggtagagcagtcgccacaagagccagactcctcctcgggcatcggcaagacaggccagcagcccgctaaaaagagactcaattttggtcagactggcgactcagagtcagtccccgacccacaacctctcggagaacctccagcaacccccgctgctgtgggacctactacaatggcttcaggcggtggcgcaccaatggcagacaataacgaaggcgccgacggagtgggtaatgcctcaggaaattggcattgcgattccacatggctgggcgacagagtcatcaccaccagcacccgaacatgggccttgcccacctataacaaccacctctacaagcaaatctccagtgcttcaacgggggccagcaacgacaaccactacttcggctacagcaccccctgggggtattttgatttcaacagattccactgccatttctcaccacgtgactggcagcgactcatcaacaacaattggggattccggcccaagagactcaacttcaagctcttcaacatccaagtcaaggaggtcacgacgaatgatggcgtcacgaccatcgctaataaccttaccagcacggttcaagtcttctcggactcggagtaccagctgccgtacgttctcggctctgcccaccagggctgcctgcctccgttcccggcggacgtgttcatgattccccagtacggctacctaacactcaacaacggtagtcaggccgtgggacgctcctccttctactgcctggaatactttccttcgcagatgctgagaaccggcaacaacttccagtttacttacaccttcgaggacgtgcctttccacagcagctacgcccacagccagagcttggaccggctgatgaatcctctgattgaccagtacctgtactacttgtctcggactcaaacaacaggaggcacggcaaatacgcagactctgggcttcagccaaggtgggcctaatacaatggccaatcaggcaaagaactggctgccaggaccctgttaccgccaacaacgcgtctcaacgacaaccgggcaaaacaacaatagcaattttacctggactggtgcttcaaaatataacctcaatgggcgtgaatccatcatcaaccctggcactgctatggcctcacacaaagacgacgaagacaagttctttcccatgagcggtgtcatgatttttggaaaagagagcgccggagcttcaaacactgcattggacaatgtcatgattacagacgaagaggaaattaaagccactaaccctgtggccaccgaaagatttgggaccgtggcagtcaatttccagagcagcagcacagaccctgcgaccggagatgtgcatgctatgggagcattacctggcatggtgtggcaagatagagacgtgtacctgcagggtcccatttgggccaaaattcctcacacagatggacactttcacccgtctcctcttatgggcggctttggactcaagaacccgcctcctcagatcctcatcaaaaacacgcctgttcctgcgaatcctccggcggagttttcagctacaaagtttgcttcattcatcacccaatactccacaggacaagtgagtgtggaaattgaatgggagctgcagaaagaaaacagcaagcgctggaatcccgaagtgcagtacacatccaattatgcaaaatctgccaacgttgattttactgtggacaacaatggactttatactgagcctcgccccattggcacccgttacctcacccgtcccctgtaa

SEQ ID NO: 353 - protein, 736 aa, Artificial Sequence
  Description of Artificial Sequence: Synthetic polypeptide
MAADGYLPDWLEDNLSEGIREWWDLKPGAPKPKANQQKQDDGRGLVLPGYKYLGPFNGLDKGEPVNAADAAALEHDKAYDQQLKAGDNPYLRYNHADAEFQERLQEDTSFGGNLGRAVFQAKKRVLEPLGLVEEGAKTAPGKKRPVEQSPQEPDSSSGIGKTGQQPAKKRLNFGQTGDSESVPDPQPLGEPPATPAAVGPTTMASGGGAPMADNNEGADGVGNASGNWHCDSTWLGDRVITTSTRTWALPTYNNHLYKQISSASTGASNDNHYFGYSTPWGYFDFNRFHCHFSPRDWQRLINNNWGFRPKRLNFKLFNIQVKEVTTNDGVTTIANNLTSTVQVFSDSEYQLPYVLGSAHQGCLPPFPADVFMIPQYGYLTLNNGSQAVGRSSFYCLEYFPSQMLRTGNNFQFTYTFEDVPFHSSYAHSQSLDRLMNPLIDQYLYYLSRTQTTGGTANTQTLGFSQGGPNTMANQAKNWLPGPCYRQQRVSTTTGQNNNSNFTWTGASKYNLNGRESIINPGTAMASHKDDEDKFFPMSGVMIFGKESAGASNTALDNVMITDEEEIKATNPVATERFGTVAVNFQSSSTDPATGDVHAMGALPGMVWQDRDVYLQGPIWAKIPHTDGHFHPSPLMGGFGLKNPPPQILIKNTPVPANPPAEFSATKFASFITQYSTGQVSVEIEWELQKENSKRWNPEVQYTSNYAKSANVDFTVDNNGLYTEPRPIGTRYLTRPL

SEQ ID NO: 354 - DNA, 2211 bp, Artificial Sequence
  Description of Artificial Sequence: Synthetic polynucleotide
atggctgctgacggttatcttccagattggctcgaggacaacctttctgaaggcattcgagagtggtgggcgctgcaacctggagcccctaaacccaaggcaaatcaacaacatcaggacaacgctcggggtcttgtgcttccgggttacaaatacctcggacccggcaacggactcgacaagggggaacccgtcaacgcagcggacgcggcagccctcgagcacgacaaggcctacgaccagcagctcaaggccggtgacaacccctacctcaagtacaaccacgccgacgccgagttccaggagcggctcaaagaagatacgtcttttgggggcaacctcgggcgagcagtcttccaggccaaaaagaggcttcttgaacctcttggtctggttgaggaagcggctaagacggctcctggaaagaagaggcctgtagatcagtctcctcaggaaccggactcatcatctggtgttggcaaatcgggcaaacagcctgccagaaaaagactaaatttcggtcagactggcgactcagagtcagtcccagaccctcaacctctcggagaaccaccagcagcccccacaagtttgggatctaatacaatggcttcaggcggtggcgcaccaatggcagacaataacgagggtgccgatggagtgggtaattcctcaggaaattggcattgcgattcccaatggctgggcgacagagtcatcaccaccagcaccagaacctgggccctgcccacttacaacaaccatctctacaagcaaatctccagccaatcaggagcttcaaacgacaaccactactttggctacagcaccccttgggggtattttgactttaacagattccactgccacttctcaccacgtgactggcagcgactcattaacaacaactggggattccggcccaagaaactcagcttcaagctcttcaacatccaagttaaagaggtcacgcagaacgatggcacgacgactattgccaataaccttaccagcacggttcaagtgtttacggactcggagtatcagctcccgtacgtgctcgggtcggcgcaccaaggctgtctcccgccgtttccagcggacgtcttcatggtccctcagtatggatacctcaccctgaacaacggaagtcaagcggtgggacgctcatccttttactgcctggagtacttcccttcgcagatgctaaggactggaaataacttccaattcagctataccttcgaggatgtaccttttcacagcagctacgctcacagccagagtttggatcgcttgatgaatcctcttattgatcagtatctgtactacctgaacagaacgcaaggaacaacctctggaacaaccaaccaatcacggctgctttttagccaggctgggcctcagtctatgtctttgcaggccagaaattggctacctgggccctgctaccggcaacagagactttcaaagactgctaacgacaacaacaacagtaactttccttggacagcggccagcaaatatcatctcaatggccgcgactcgctggtgaatccaggaccagctatggccagtcacaaggacgatgaagaaaaatttttccctatgcacggcaatctaatatttggcaaagaagggacaacggcaagtaacgcagaattagataatgtaatgattacggatgaagaagagattcgtaccaccaatcctgtggcaacagagcagtatggaactgtggcaaataacttgcagagctcaaatacagctcccacgactagaactgtcaatgatcagggggccttacctggcatggtgtggcaagatcgtgacgtgtaccttcaaggacctatctgggcaaagattcctcacacggatggacactttcatccttctcctctgatgggaggctttggactgaaacatccgcctcctcaaatcatgatcaaaaatactccggtaccggcaaatcctccgacgactttcagcccggccaagtttgcttcatttatcactcagtactccactggacaggtcagcgtggaaattgagtgggagctacagaaagaaaacagcaaacgttggaatccagagattcagtacacttccaactacaacaagtctgttaatgtggactttactgtagacactaatggtgtttatagtgaacctcgccccattggcacccgttaccttacccgtcccctgtaa

SEQ ID NO: 355 - protein, 736 aa, Artificial Sequence
  Description of Artificial Sequence: Synthetic polypeptide
MAADGYLPDWLEDNLSEGIREWWALQPGAPKPKANQQHQDNARGLVLPGYKYLGPGNGLDKGEPVNAADAAALEHDKAYDQQLKAGDNPYLKYNHADAEFQERLKEDTSFGGNLGRAVFQAKKRLLEPLGLVEEAAKTAPGKKRPVDQSPQEPDSSSGVGKSGKQPARKRLNFGQTGDSESVPDPQPLGEPPAAPTSLGSNTMASGGGAPMADNNEGADGVGNSSGNWHCDSQWLGDRVITTSTRTWALPTYNNHLYKQISSQSGASNDNHYFGYSTPWGYFDFNRFHCHFSPRDWQRLINNNWGFRPKKLSFKLFNIQVKEVTQNDGTTTIANNLTSTVQVFTDSEYQLPYVLGSAHQGCLPPFPADVFMVPQYGYLTLNNGSQAVGRSSFYCLEYFPSQMLRTGNNFQFSYTFEDVPFHSSYAHSQSLDRLMNPLIDQYLYYLNRTQGTTSGTTNQSRLLFSQAGPQSMSLQARNWLPGPCYRQQRLSKTANDNNNSNFPWTAASKYHLNGRDSLVNPGPAMASHKDDEEKFFPMHGNLIFGKEGTTASNAELDNVMITDEEEIRTTNPVATEQYGTVANNLQSSNTAPTTRTVNDQGALPGMVWQDRDVYLQGPIWAKIPHTDGHFHPSPLMGGFGLKHPPPQIMIKNTPVPANPPTTFSPAKFASFITQYSTGQVSVEIEWELQKENSKRWNPEIQYTSNYNKSVNVDFTVDTNGVYSEPRPIGTRYLTRPL

SEQ ID NO: 356 - DNA, 2211 bp, Artificial Sequence
  Description of Artificial Sequence: Synthetic polynucleotide
atggctgccgatggttatcttccagattggctcgaggacaaccttagtgaaggaattcgcgagtggtgggctttgaaacctggagcccctcaacccaaggcaaatcaacaacatcaagacaacgctcgaggtcttgtgcttccgggttacaaataccttggacccggcaacggactcgacaagggggagccggtcaacgcagcagacgcggcggccctcgagcacgacaaggcctacgaccagcagctcaaggccggagacaacccgtacctcaagtacaaccacgccgacgccgagttccaggagcggctcaaagaagatacgtcttttgggggcaacctcgggcgagcagtcttccaggccaaaaagaggcttcttgaacctcttggtctggttgaggaagcggctaagacggctcctggaaagaagagaccggtagagccatcaccccagcgttctccagactcctctacgggcatcggcaagaaaggccaacagcccgctaaaaagagactcaattttggtcagactggcgactcagagtcagtccccgacccacaacctctcggagaacctccagcaacccccgctgctgtgggacctactacaatggcttcaggcggtggcgcaccaatggcagacaataacgagggtgccgatggagtgggtaattcctcaggaaattggcattgcgattcccaatggctgggcgacagagtcatcaccaccagcaccagaacctgggccctgcccacttacaacaaccatctctacaagcaaatctccagccaatcaggagcttcaaacgacaaccactactttggctacagcaccccttgggggtattttgactttaacagattccactgccacttttcaccacgtgactggcaaagactcatcaacaacaactggggattccgacccaagagactcaacttcaagctcttcaacatccaagtcaaggaggtcacgacgaatgatggcgtcacgaccatcgctaataaccttaccagcacggttcaagtcttctcggactcggagtaccagttgccgtacgtcctcggctctgcgcaccagggctgcctccctccgttcccggcggacgtgttcatgattccgcagtacggctacctaacgctcaacaatggcagccaagccgtgggacgttcatccttttactgcctggaatatttcccttctcagatgctgagaacgggcaacaactttaccttcagctacacttttgaggacgttcctttccacagcagctacgctcacagccagagtctggaccgtctcatgaatcctctcatcgaccagtacctgtattacttgagcagaacaaacactccaagtggaaccaccacgcagtcaaggcttcagttttctcaggccggagcgagtgacattcgggaccagtctaggaactggcttcctggaccctgttaccgccagcagcgcgtttctaaaacaaaaacagacaacaacaacagcaattttacctggactggtgcttcaaaatataaccttaatgggcgtgaatctataatcaaccctggcactgctatggcctcacacaaagacgacgaagacaagttctttcccatgagcggtgtcatgatttttggaaaagagagcgccggagcttcaaacactgcattggacaatgtcatgattacagacgaagaggaaattaaagccactaaccctgtggccaccgaaagatttgggaccgtggcagtcaatttccagagcagcagcacagaccctgcgaccggagatgtgcatgttatgggagccttacctggaatggtgtggcaagacagagacgtatacctgcagggtcctatttgggccaaaattcctcacacggatggacactttcacccgtctcctcttatgggcggctttggactcaagaacccgcctcctcagatcctcatcaaaaacacgcctgttcctgcgaatcctccggcggagttttcagctacaaagtttgcttcattcatcacccaatactccacaggacaagtgagtgtggaaattgaatgggagctgcagaaagaaaacagcaagcgctggaatcccgaagtgcagtacacatccaattatgcaaaatctgccaacgttgattttactgtggacaacaatggactttatactgagcctcgccccattggcacccgttaccttacccgtcccctgtaa

SEQ ID NO: 357 - protein, 736 aa, Artificial Sequence
  Description of Artificial Sequence: Synthetic polypeptide
MAADGYLPDWLEDNLSEGIREWWALKPGAPQPKANQQHQDNARGLVLPGYKYLGPGNGLDKGEPVNAADAAALEHDKAYDQQLKAGDNPYLKYNHADAEFQERLKEDTSFGGNLGRAVFQAKKRLLEPLGLVEEAAKTAPGKKRPVEPSPQRSPDSSTGIGKKGQQPAKKRLNFGQTGDSESVPDPQPLGEPPATPAAVGPTTMASGGGAPMADNNEGADGVGNSSGNWHCDSQWLGDRVITTSTRTWALPTYNNHLYKQISSQSGASNDNHYFGYSTPWGYFDFNRFHCHFSPRDWQRLINNNWGFRPKRLNFKLFNIQVKEVTTNDGVTTIANNLTSTVQVFSDSEYQLPYVLGSAHQGCLPPFPADVFMIPQYGYLTLNNGSQAVGRSSFYCLEYFPSQMLRTGNNFTFSYTFEDVPFHSSYAHSQSLDRLMNPLIDQYLYYLSRTNTPSGTTTQSRLQFSQAGASDIRDQSRNWLPGPCYRQQRVSKTKTDNNNSNFTWTGASKYNLNGRESIINPGTAMASHKDDEDKFFPMSGVMIFGKESAGASNTALDNVMITDEEEIKATNPVATERFGTVAVNFQSSSTDPATGDVHVMGALPGMVWQDRDVYLQGPIWAKIPHTDGHFHPSPLMGGFGLKNPPPQILIKNTPVPANPPAEFSATKFASFITQYSTGQVSVEIEWELQKENSKRWNPEVQYTSNYAKSANVDFTVDNNGLYTEPRPIGTRYLTRPL

SEQ ID NO: 358 - DNA, 2211 bp, Artificial Sequence
  Description of Artificial Sequence: Synthetic polynucleotide
atggctgccgatggttatcttccagattggctcgaggacaacctctctgagggcattcgcgagtggtgggacttgaaacctggagcccctaaacccaaggcaaatcaacaacatcaggacaacgctcgaggtcttgtgcttccgggttacaaataccttggacccggcaacggactcgacaagggggagccggtcaacgcagcagacgcggcggccctcgagcacgacaaggcctacgaccagcagctcaaggccggagacaacccgtacctcaagtacaaccacgccgacgccgagttccaggagcggctcaaagaagatacgtcttttgggggcaacctcgggcgagcagtcttccaggccaaaaagaggcttcttgaacctcttggtctggttgaggaagcggctaagacggctcctggaaagaagagaccggtagagccatcaccccagcgttctccagactcctctacgggcatcggcaagaaaggccaacagcccgctaaaaagagactcaattttggtcagactggcgactcagagtcagtccccgacccacaacctctcggagaacctccagcaacccccgctgctgtgggacctactacaatggcttcaggcggtggcgcaccaatggcagacaataacgagggtgccgatggagtgggtaattcctcaggaaattggcattgcgattcccaatggctgggcgacagagtcatcaccaccagcaccagaacctgggccctgcccacttacaacaaccatctctacaagcaaatctccagccaatcaggagcttcaaacgacaaccactactttggctacagcaccccttgggggtattttgactttaacagattccactgccacttttcaccacgtgactggcaaagactcatcaacaacaactggggattccgacccaagagactcaacttcaagctcttcaacatccaagtcaaggaggtcacgacgaatgatggcgtcacgaccatcgctaataaccttaccagcacggttcaagtcttctcggactcggagtaccagttgccgtacgtcctcggctctgcgcaccagggctgcctccctccgttcccggcggacgtgttcatgattccgcagtacggctacctaacgctcaacaatggcagccaagccgtgggacgttcatccttttactgcctggaatatttcccttctcagatgctgagaacgggcaacaactttaccttcagctacacttttgaggacgttcctttccacagcagctacgctcacagccagagtctggaccgtctcatgaatcccctcatcgaccagtacctgtattacttgagcagaacaaacactccaagtggaaccaccacgcagtcaaggcttcagttttctcaggccggagcgagtgacattcgggaccagtctaggaactggcttcctggaccctgttaccggcagcagcgcgtttctaaaacaaaaacagacaacaacaacagcaactttacctggactggtgcttcaaaatataaccttaatgggcgtgaatctataatcaaccctggcactgctatggcctcacacaaagacgacgaagacaagttctttcccatgagcggtgtcatgatttttggaaaggagagcgccggagcttcaaacactgcattggacaatgtcatgatcacagacgaagaggaaatcaaagccactaaccccgtggccaccgaaagatttgggactgtggcagtcaatctccagagcagcagcacagaccctgcgaccggagatgtgcatgttatgggagccttacctggaatggtgtggcaagacagagacgtgtacctgcagggtcctatttgggccaaaattcctcacacggatggacactttcacccgtctcctctcatgggcggctttggacttaagcacccgcctcctcagatcctcatcaaaaacacgcctgttcctgcgaatcctccggcagagttttcggctacaaagtttgcttcattcatcacccagtattccacaggacaagtgagtgtggaaattgaatgggagctgcagaaagaaaacagcaagcgctggaatcccgaagtgcagtacacatccaattatgcaaaatctgccaacgttgattttactgtggacaacaatggactttatactgagcctcgccccattggcacccgttacctcacccgtcccctgtaa

SEQ ID NO: 359 - protein, 736 aa, Artificial Sequence
  Description of Artificial Sequence: Synthetic polypeptide
MAADGYLPDWLEDNLSEGIREWWDLKPGAPKPKANQQHQDNARGLVLPGYKYLGPGNGLDKGEPVNAADAAALEHDKAYDQQLKAGDNPYLKYNHADAEFQERLKEDTSFGGNLGRAVFQAKKRLLEPLGLVEEAAKTAPGKKRPVEPSPQRSPDSSTGIGKKGQQPAKKRLNFGQTGDSESVPDPQPLGEPPATPAAVGPTTMASGGGAPMADNNEGADGVGNSSGNWHCDSQWLGDRVITTSTRTWALPTYNNHLYKQISSQSGASNDNHYFGYSTPWGYFDFNRFHCHFSPRDWQRLINNNWGFRPKRLNFKLFNIQVKEVTTNDGVTTIANNLTSTVQVFSDSEYQLPYVLGSAHQGCLPPFPADVFMIPQYGYLTLNNGSQAVGRSSFYCLEYFPSQMLRTGNNFTFSYTFEDVPFHSSYAHSQSLDRLMNPLIDQYLYYLSRTNTPSGTTTQSRLQFSQAGASDIRDQSRNWLPGPCYRQQRVSKTKTDNNNSNFTWTGASKYNLNGRESIINPGTAMASHKDDEDKFFPMSGVMIFGKESAGASNTALDNVMITDEEEIKATNPVATERFGTVAVNLQSSSTDPATGDVHVMGALPGMVWQDRDVYLQGPIWAKIPHTDGHFHPSPLMGGFGLKHPPPQILIKNTPVPANPPAEFSATKFASFITQYSTGQVSVEIEWELQKENSKRWNPEVQYTSNYAKSANVDFTVDNNGLYTEPRPIGTRYLTRPL

SEQ ID NO: 360 - DNA, 2214 bp, Artificial Sequence
  Description of Artificial Sequence: Synthetic polynucleotide
atggctgccgatggttatcttccagattggctcgaggacaaccttagtgaaggaattcgcgagtggtgggctttgaaacctggagcccctcaacccaaggcaaatcaacaacatcaagacaacgctcgaggtcttgtgcttccgggttacaaataccttggacccggcaacggactcgacaagggggagccggtcaacgcagcagacgcggcggccctcgagcacgacaaggcctacgaccagcagctgcaggcgggtgacaatccgtacctgcggtataaccacgccgacgccgagtttcaggagcgtctgcaagaagatacgtcttttgggggcaaccttggcagagcagtcttccaggccaaaaagaggatccttgagcctcttggtctggttgaggaagcagctaaaacggctcctggaaagaagaggcctgtagatcagtctcctcaggaaccggactcatcatctggtgttggcaaatcgggcaaacagcctgccagaaaaagactaaatttcggtcagactggcgactcagagtcagtcccagaccctcaacctctcggagaaccaccagcagcccccacaagtttgggatctaatacaatggcttcaggcggtggcgcaccaatggcagacaataacgagggtgccgatggggtgggtagttcctcgggaaattggcattgcgattcccaatgactgggggacagagtcatcaccaccagcacccgaacctgggccctgcccacctacaacaatcacctctacaagcaaatctccaacgggacatcgggaggagccaccaacgacaacacctacttcggctacagcaccccctgggggtattttgactttaacagattccactgccacttttcaccacgtgactggcagcgactcatcaacaacaactggggattccggcccaagagactcagcttcaagctcttcaacatccaggtcaaggaggtcacgcagaatgaaggcaccaagaccatcgccaataacctcaccagcaccatccaggtgtttacggactcggagtaccagctgccgtacgttctcggctctgcgcaccagggctgcctccctccgttcccggcggacgtgttcatgattccgcaatacggctacctgacgctcaacaatggcagccaagccgtgggacgttcatccttttactgcctggaatatttcccttctcagatgctgagaacgggcaacaactttaccttcagctacacctttgaggaagtgcctttccacagcagctacgcgcacagccagagcttggaccggctgatgaatcctctgattgaccagtacctgtactacttgtctcggactcaaacaacaggaggcacggcaaatacgcagactctgggcttcagccaaggtgggcctaatacaatggccaatcaggcaaagaactggctgccaggaccctgttaccgccaacaacgcgtctcaacgacaaccgggcaaaacaacaatagcaactttgcctggactgctgggaccaaataccatctgaatggaagaaattcattggctaatcctggcatcgctatggcaacacacaaagacgacgaggagcgtttttttcccagtaacgggatcctgatttttggcaaacaaaatgctgccagagacaatgcggattacagcgatgtcatgctcaccagcgaggaagaaatcaaaaccactaaccctgtggctacagaggaatacggtatcgtggcagataacttgcagcagcaaaacacggctcctcaaattggaactgtcaacagccagggggccttacccggtatggtctggcagaaccgggacgtgtacctgcagggtcccatctgggccaagattcctcacacggacggcaacttccacccgtctccgctgatgggcggctttggcctgaaacatcctccgcctcagatcctgatcaagaacacgcctgtacctgcggatcctccgaccaccttcaaccagtcaaagctgaactctttcatcacgcaatacagcaccggacaggtcagcgtggagatcgagtgggagctgcagaaggaaaacagcaagcgctggaacccggagatccagtacacttccaactattacaagtctaataatgttgaatttgctgttaatactgaaggtgtatatagtgaaccccgccccattggcaccagatacctgactcgtaatctgtaa

SEQ ID NO: 361 - protein, 736 aa, Artificial Sequence
  Description of Artificial Sequence: Synthetic polypeptide
MAADGYLPDWLEDNLSEGIREWWALKPGAPQPKANQQHQDNARGLVLPGYKYLGPGNGLDKGEPVNAADAAALEHDKAYDQQLQAGDNPYLRYNHADAEFQERLQEDTSFGGNLGRAVFQAKKRILEPLGLVEEAAKTAPGKKRPVDQSPQEPDSSSGVGKSGKQPARKRLNFGQTGDSESVPDPQPLGEPPAAPTSLGSNTMASGGGAPMADNNEGADGVGSSSGNWHCDSQLGDRVITTSTRTWALPTYNNHLYKQISNGTSGGATNDNTYFGYSTPWGYFDFNRFHCHFSPRDWQRLINNNWGFRPKRLSFKLFNIQVKEVTQNEGTKTIANNLTSTIQVFTDSEYQLPYVLGSAHQGCLPPFPADVFMIPQYGYLTLNNGSQAVGRSSFYCLEYFPSQMLRTGNNFTFSYTFEEVPFHSSYAHSQSLDRLMNPLIDQYLYYLSRTQTTGGTANTQTLGFSQGGPNTMANQAKNWLPGPCYRQQRVSTTTGQNNNSNFAWTAGTKYHLNGRNSLANPGIAMATHKDDEERFFPSNGILIFGKQNAARDNADYSDVMLTSEEEIKTTNPVATEEYGIVADNLQQQNTAPQIGTVNSQGALPGMVWQNRDVYLQGPIWAKIPHTDGNFHPSPLMGGFGLKHPPPQILIKNTPVPADPPTTFNQSKLNSFITQYSTGQVSVEIEWELQKENSKRWNPEIQYTSNYYKSNNVEFAVNTEGVYSEPRPIGTRYLTRNL

SEQ ID NO: 362 - DNA, 2214 bp, Artificial Sequence
  Description of Artificial Sequence: Synthetic polynucleotide
atggctgccgatggttatcttccagattggctcgaggacaaccttagtgaaggaattcgcgagtggtgggctttgaaacctggagcccctcaacccaaggcaaatcaacaacatcaagacaacgctcgaggtcttgtgcttccgggttacaaataccttggacccggcaacggactcgacaagggggagccggtcaacgcagcagacgcggcggccctcgagcacgacaaggcctacgaccagcagctgcaggcgggtgacaatccgtacctgcggtataaccacgccgacgccgagtttcaggagcgtctgcaagaagatacgtcttttgggggcaaccttggcagagcagtcttccaggccaaaaagaggatccttgagcctcttggtctggttgaggaagcagctaaaacggctcctggaaagaagaggcctgtagatcagtctcctcaggaaccggactcatcatctggtgttggcaaatcgggcaaacagcctgccagaaaaagactaaatttcggtcagactggcgactcagagtcagtcccagaccctcaacctctcggagaaccaccagcagcccccacaagtttgggatctaatacaatggcttcaggcggtggcgcaccaatggcagacaataacgagggtgccgatggggtgggtagttcctcgggaaattggcattgcgattcccaatggctgggggacagagtcatcaccaccagcacccgaacctgggccctgcccacctacaacaatcacctctacaagcaaatctccaacgggacatcgggaggagccaccaacgacaacacctacttcggctacagcaccccctgggggtattttgactttaacagattccactgccacttttcaccacgtgactggcagcgactcatcaacaacaactggggattccggcccaagagactcagcttcaagctcttcaacatccaggtcaaggaggtcacgcagaatgaaggcaccaagaccatcgccaataacctcaccagcaccatccaggtgtttacggactcggagtaccagctgccgtacgttctcggctctgcgcaccagggctgcctccctccgttcccggcggacgtgttcatgattccgcaatacggctacctgacgctcaacaatggcagccaagccgtgggacgttcatccttttactgcctggaatatttcccttctcagatgctgagaacgggcaacaactttaccttcagctacacctttgaggaagtgccttttcacagcagctacgcgcacagccagagcttggaccggctgatgaatcctctgattgaccagtacctgtactacttgtctcggactcaaacaacaggaggcacggcaaatacgcagactctgggcttcagccaaggtgggcctaatacaatggccaatcaggcaaagaactggctgccaggaccctgttaccgccaacaacgcgtctcaacgacaaccgggcaaaacaacaatagcaactttgcctggactgctgggaccaaataccatctgaatggaagaaattcattggctaatcctggcatcgctatggcaacacacaaagacgacgaggagcgtttttttcccagtaacgggatcctgatttttggcaaacaaaatgctgccagagacaatgcggattacagcgatgtcatgctcaccagcgaggaagaaatcaaaaccactaaccctgtggctacagaggaatacggtatcgtggcagataacttgcagcagcaaaacacggctcctcaaattggaactgtcaacagccagggggccttacccggtatggtctggcagaaccgggacgtgtacctgcagggtcccatctgggccaagattcctcacacggacggcaacttccacccgtctccgctgatgggcggctttggcctgaaacatcctccgcctcagatcctgatcaagaacacgcctgtacctgcggatcctccgaccaccttcaaccagtcaaagctgaactctttcatcacgcaatacagcaccggacaggtcagcgtggagatcgagtgggagctgcagaaggaaaacagcaagcgctggaacccggagatccagtacacttccaactattacaagtctaataatgttgaatttgctgttaatactgaaggtgtatatagtgaaccccgccccattggcaccagatacctgactcgtaatctgtaa

SEQ ID NO: 363 - protein, 737 aa, Artificial Sequence; identical to SEQ ID NO: 351
  Description of Artificial Sequence: Synthetic polypeptide

SEQ ID NO: 364 - DNA, 2211 bp, Artificial Sequence
  Description of Artificial Sequence: Synthetic polynucleotide
atggctgccgatggttatcttccagattggctcgaggacaacctctctgagggcattcgcgagtggtgggacttgaaacctggagcccctaaacccaaggcaaatcaacaacatcaggacaacgctcgaggtcttgtgcttccgggttacaaataccttggacccggcaacggactcgacaagggggagccggtcaacgcagcagacgcggcggccctcgagcacgacaaggcctacgaccagcagctcaaggccggagacaacccgtacctcaagtacaaccacgccgacgccgagttccaggagcggctcaaagaagatacgtcttttgggggcaacctcgggcgagcagtcttccaggccaaaaagaggcttcttgaacctcttggtctggttgaggaagcggctaagacggctcctggaaagaagagaccggtagagccatcaccccagcgttctccagactcctctacgggcatcggcaagaaaggccaacagcccgctaaaaagagactcaattttggtcagactggcgactcagagtcagtccccgacccacaacctctcggagaacctccagcaacccccgctgctgtgggacctactacaatggcttcaggcggtggcgcaccaatggcagacaataacgagggtgccgatggagtgggtaattcctcaggaaattggcattgcgattcccaatggctgggcgacagagtcatcaccaccagcaccagaacctgggccctgcccacttacaacaaccatctctacaagcaaatctccagccaatcaggagcttcaaacgacaaccactactttggctacagcaccccttgggggtattttgactttaacagattccactgccacttttcaccacgtgactggcaaagactcatcaacaacaactggggattccgacccaagagactcaacttcaagctcttcaacatccaagtcaaggaggtcacgacgaatgatggcgtcacgaccatcgctaataaccttaccagcacggttcaagtcttctcggactcggagtaccagttgccgtacgtcctcggctctgcgcaccagggctgcctccctccgttcccggcggacgtgttcatgattccgcagtacggctacctaacgctcaacaatggcagccaagccgtgggacgttcatccttttactgcctggaatatttcccttctcagatgctgagaacgggcaacaactttaccttcagctacacttttgaggacgttcctttccacagcagctacgctcacagccagagtctggaccgtctcatgaatcctctcatcgaccagtacctgtattacttgagcagaacaaacactccaagtggaaccaccacgcagtcaaggcttcagttttctcaggccggagcgagtgacattcgggaccagtctaggaactggcttcctggaccctgttaccgccagcagcgcgtttctaaaacaaaaacagacaacaacaacagcaattttacctggactggtgcttcaaaatataaccttaatgggcgtgaatctataatcaaccctggcactgctatggcctcacacaaagacgacgaagacaagttctttcccatgagcggtgtcatgatttttggaaaagagagcgccggagcttcaaacactgcattggacaatgtcatgattacagacgaagaggaaattaaagccactaaccctgtggccaccgaaagatttgggaccgtggcagtcaatttccagagcagcagcacagaccctgcgaccggagatgtgcatgctatgggagcattacctggcatggtgtggcaagatagagacgtgtacctgcagggtcccatttgggccaaaattcctcacacagatggacactttcacccgtctcctcttatgggcggctttggactcaagaacccgcctcctcagatcctcatcaaaaacacgcctgttcctgcgaatcctccggcggagttttcagctacaaagtttgcttcattcatcacccaatactccacaggacaagtgagtgtggaaattgaatgggagctgcagaaagaaaacagcaagcgctggaatcccgaagtgcagtacacatccaattatgcaaaatctgccaacgttgattttactgtggacaacaatggactttatactgagcctcgccccattggcacccgttaccttacccgtcccctgtaa

SEQ ID NO: 365 - protein, 736 aa, Artificial Sequence
  Description of Artificial Sequence: Synthetic polypeptide
MAADGYLPDWLEDNLSEGIREWWDLKPGAPKPKANQQHQDNARGLVLPGYKYLGPGNGLDKGEPVNAADAAALEHDKAYDQQLKAGDNPYLKYNHADAEFQERLKEDTSFGGNLGRAVFQAKKRLLEPLGLVEEAAKTAPGKKRPVEPSPQRSPDSSTGIGKKGQQPAKKRLNFGQTGDSESVPDPQPLGEPPATPAAVGPTTMASGGGAPMADNNEGADGVGNSSGNWHCDSQWLGDRVITTSTRTWALPTYNNHLYKQISSQSGASNDNHYFGYSTPWGYFDFNRFHCHFSPRDWQRLINNNWGFRPKRLNFKLFNIQVKEVTTNDGVTTIANNLTSTVQVFSDSEYQLPYVLGSAHQGCLPPFPADVFMIPQYGYLTLNNGSQAVGRSSFYCLEYFPSQMLRTGNNFTFSYTFEDVPFHSSYAHSQSLDRLMNPLIDQYLYYLSRTNTPSGTTTQSRLQFSQAGASDIRDQSRNWLPGPCYRQQRVSKTKTDNNNSNFTWTGASKYNLNGRESIINPGTAMASHKDDEDKFFPMSGVMIFGKESAGASNTALDNVMITDEEEIKATNPVATERFGTVAVNFQSSSTDPATGDVHAMGALPGMVWQDRDVYLQGPIWAKIPHTDGHFHPSPLMGGFGLKNPPPQILIKNTPVPANPPAEFSATKFASFITQYSTGQVSVEIEWELQKENSKRWNPEVQYTSNYAKSANVDFTVDNNGLYTEPRPIGTRYLTRPL

SEQ ID NO: 366 - DNA, 2211 bp, Artificial Sequence
  Description of Artificial Sequence: Synthetic polynucleotide
atggctgccgatggttatcttccagattggctcgaggacaaccttagtgaaggaattcgcgagtggtgggcgctgaaacctggagccccgaagcccaaagccaaccagcaaaagcaggacgacggccggggtctggtgcttccgggttacaaatacctcggacccggtaacggactcgacaaaggagagccggtcaacgaggcggacgcggcagccctcgagcacgacaaggcctacgaccagcagctcaaagcgggtgacaatccgtacctgcggtataaccacgccgacgccgagtttcaggagcgtctgcaagaagatacgtcttttgggggcaacctcgggcgagcagtcttccaggccaagaagcgggttctcgaacctctcggtctggttgaggaaggcgctaagacggctcccggaaagaaacgtccggtagagcagtcgccacaagagccagactcctctacgggcatcggcaagaaaggccaacagcccgccagaaaaagactcaatttcggtcagactggcgactcagagtcagttccagaccctcaacctctcggagaacctccagcagcgccctctggtgtgggacctactacaatggcttcaggcggtggcgcaccaatggcagacaataacgaaggcgccgacggagtgggtaatgcctcaggaaattggcattgcgattccacatggctgggcgacagagtcatcaccaccagcacccgaacatgggccttgcccacctataacaaccacctctacaagcaaatctccagtgcttcaacgggggccagcaacgacaacacctacttcggctacagcaccccctgggggtattttgatttcaacagattccactgccatttctcaccacgtgactggcagcgactcatcaacaacaattggggattccggcccaagagactcaacttcaaactcttcaacatccaagtcaaggaggtcacgacgaatgatggcgtcacgaccatcgctaataaccttaccagcacggttcaagtcttctcggactcggagtaccagttgccgtacgtcctcggctctgcgcaccagggctgcctccctccgttcccggcggacgtgttcatgattccgcagtacggctacctaacgctcaacaatggcagccaggcagtgggacggtcatccttttactgcctggaatatttcccatcgcagatgctgagaacgggcaataactttaccttcagctacaccttcgaggacgtgcctttccacagcagctacgcgcacagccagagcctggaccggctgatgaatcctctcatcgaccagtacctgtattacctgaacagaactcagaatcagtccggaagtgcccaaaacaaggacttgctgtttagccgggggtctccagctggcatgtctgttcagcccaaaaactggctacctggaccctgttatcggcagcagcgcgtttctaaaacaaaaacagacaacaacaacagcaattttacctggactggtgcttcaaaatataacctcaatgggcgtgaatccatcatcaaccctggcactgctatggcctcacacaaagacgacgaagacaagttctttcccatgagcggtgtcatgatttttggaaaagagagcgccggagcttcaaacactgcattggacaatgtcatgattacagacgaagaggaaattaaagccactaaccctgtggccaccgaaagatttgggaccgtggcagtcaatttccagagcagcagcacagaccctgcgaccggagatgtgcatgttatgggagccttacctggaatggtgtggcaagacagagacgtatacctgcagggtcctatttgggccaaaattcctcacacagatggacactttcacccgtctcctcttatgggcggctttggactcaagaacccgcctcctcagatcctcatcaaaaacacgcctgttcctgcgaatcctccggcagagttttcggctacaaagtttgcttcattcatcacccagtattccacaggacaagtgagcgtggagattgaatgggagctgcagaaagaaaacagcaaacgctggaatcccgaagtgcagtatacatctaactatgcaaaatctgccaacgttgatttcactgtggacaacaatggactttatactgagcctcgccccattggcacccgttacctcacccgtcccctgtaa

SEQ ID NO: 367 - protein, 736 aa, Artificial Sequence
  Description of Artificial Sequence: Synthetic polypeptide
MAADGYLPDWLEDNLSEGIREWWALKPGAPKPKANQQKQDDGRGLVLPGYKYLGPGNGLDKGEPVNEADAAALEHDKAYDQQLKAGDNPYLRYNHADAEFQERLQEDTSFGGNLGRAVFQAKKRVLEPLGLVEEGAKTAPGKKRPVEQSPQEPDSSTGIGKKGQQPARKRLNFGQTGDSESVPDPQPLGEPPAAPSGVGPTTMASGGGAPMADNNEGADGVGNASGNWHCDSTWLGDRVITTSTRTWALPTYNNHLYKQISSASTGASNDNTYFGYSTPWGYFDFNRFHCHFSPRDWQRLINNNWGFRPKRLNFKLFNIQVKEVTTNDGVTTIANNLTSTVQVFSDSEYQLPYVLGSAHQGCLPPFPADVFMIPQYGYLTLNNGSQAVGRSSFYCLEYFPSQMLRTGNNFTFSYTFEDVPFHSSYAHSQSLDRLMNPLIDQYLYYLNRTQNQSGSAQNKDLLFSRGSPAGMSVQPKNWLPGPCYRQQRVSKTKTDNNNSNFTWTGASKYNLNGRESIINPGTAMASHKDDEDKFFPMSGVMIFGKESAGASNTALDNVMITDEEEIKATNPVATERFGTVAVNFQSSSTDPATGDVHVMGALPGMVWQDRDVYLQGPIWAKIPHTDGHFHPSPLMGGFGLKNPPPQILIKNTPVPANPPAEFSATKFASFITQYSTGQVSVEIEWELQKENSKRWNPEVQYTSNYAKSANVDFTVDNNGLYTEPRPIGTRYLTRPL

SEQ ID NO: 368 - DNA, 2205 bp, Artificial Sequence
  Description of Artificial Sequence: Synthetic polynucleotide
atggctgctgacggttatcttccagattggctcgaggacaacctttctgaaggcattcgtgagtggtgggctctgaaacctggagtccctcaacccaaagcgaaccaacaacaccaggacaaccgtcggggtcttgtgcttccgggttacaaatacctcggacccggtaacggactcgacaaaggagagccggtcaacgaggcggacgcggcagccctcgaacacgacaaggcctacgaccagcagctcaaggccggagacaacccgtacctcaagtacaaccacgccgacgccgagttccaggagcggctcaaagaagatacgtcttttgggggcaacctcgggcgagcagtcttccaggccaaaaagaggcttcttgaacctcttggtctggttgaggaagcggctaagacggctcctggaaagaagaggcctgtagagcagtctcctcaggaaccggactcctccgcgggtattggcaaatcgggtgcacagcccgctaaaaagagactcaatttcggtcagactggcgacacagagtcagtcccagaccctcaaccaatcggagaacctcccgcagccccctcaggtgtgggatctcttacaatggcttcaggtggtggcgcaccagtggcagacaataacgaaggtgccgatggagtgggtagttcctcgggaaattggcattgcgattcccaatggctgggggacagagtcatcaccaccagcacccgaacctgggccctgcccacctacaacaaccacctctacaaacaaatttccagccaatcaggagcctcgaacgacaatcactactttggctacagcaccccttgggggtattttgacttcaacagattccactgccacttttcaccacgtgactggcagcgactcatcaacaacaactggggattccggcccaagagactcagcttcaagctcttcaacatccaggtcaaagaggttacggacaacaatggagtcaagaccatcgccaataaccttaccagcacggtccaggtcttcacggactcagactatcagctcccgtacgtgctcgggtcggctcacgagggctgcctcccgccgttcccagcggacgttttcatgattcctcagtacgggtatctgacgcttaatgatggaagccaggccgtgggtcgttcgtccttttactgcctggaatatttcccgtcgcaaatgctaagaacgggtaacaacttccagttcagctacgagtttgagaacgtacctttccatagcagctacgctcacagccaaagcctggaccgactaatgaatccactcatcgaccaatacttgtactatctctcaaagactattaacggttctggacagaatcaacaaacgctaaaattcagtgtggccggacccagcaacatggctgtccagggaagaaactacatacctggacccagctaccgacaacaacgtgtctcaaccactgtgactcaaaacaacaacagcgaatttgcttggcctggagcttcttcttgggctctcaatggacgtaatagcttgatgaatcctggacctgctatggccagccacaaagaaggagaggaccgtttctttcctttgtctggatctttaatttttggcaaacaaggaactggaagagacaacgtggatgcggacaaagtcatgataaccaacgaagaagaaattaaaactactaacccggtagcaacggagtcctatggacaagtggccacaaaccaccagagtgcccaagcacaggcgcagaccggctgggttcaaaaccaaggaatacttccgggtatggtttggcaggacagagatgtgtacctgcaaggacccatctgggccaagattcctcacacggacggcaacttccacccgtctccgctgatgggcggctttggcctgaaacatcctccgcctcagatcctgatcaagaacacgcctgtacctgcggatcctccgaccaccttcaaccagtcaaagctgaactctttcatcacgcaatacagcaccggacaggtcagcgtggaaattgaatgggagctgcagaaggaaaacagcaagcgctggaatcccgaagtgcagtatacatctaactatgcaaaatctgccaacgttgatttcactgtggacaacaatggactttatactgagcctcgccccattggcacccgttacctcacccgtcccctgtaa

SEQ ID NO: 369 - protein, 734 aa, Artificial Sequence
  Description of Artificial Sequence: Synthetic polypeptide
MAADGYLPDWLEDNLSEGIREWWALKPGVPQPKANQQHQDNRRGLVLPGYKYLGPGNGLDKGEPVNEADAAALEHDKAYDQQLKAGDNPYLKYNHADAEFQERLKEDTSFGGNLGRAVFQAKKRLLEPLGLVEEAAKTAPGKKRPVEQSPQEPDSSAGIGKSGAQPAKKRLNFGQTGDTESVPDPQPIGEPPAAPSGVGSLTMASGGGAPVADNNEGADGVGSSSGNWHCDSQWLGDRVITTSTRTWALPTYNNHLYKQISSQSGASNDNHYFGYSTPWGYFDFNRFHCHFSPRDWQRLINNNWGFRPKRLSFKLFNIQVKEVTDNNGVKTIANNLTSTVQVFTDSDYQLPYVLGSAHEGCLPPFPADVFMIPQYGYLTLNDGSQAVGRSSFYCLEYFPSQMLRTGNNFQFSYEFENVPFHSSYAHSQSLDRLMNPLIDQYLYYLSKTINGSGQNQQTLKFSVAGPSNMAVQGRNYIPGPSYRQQRVSTTVTQNNNSEFAWPGASSWALNGRNSLMNPGPAMASHKEGEDRFFPLSGSLIFGKQGTGRDNVDADKVMITNEEEIKTTNPVATESYGQVATNHQSAQAQAQTGWVQNQGILPGMVWQDRDVYLQGPIWAKIPHTDGNFHPSPLMGGFGLKHPPPQILIKNTPVPADPPTTFNQSKLNSFITQYSTGQVSVEIEWELQKENSKRWNPEVQYTSNYAKSANVDFTVDNNGLYTEPRPIGTRYLTRPL

SEQ ID NO: 370 - DNA, 2211 bp, Artificial Sequence
  Description of Artificial Sequence: Synthetic polynucleotide
atggctgccgatggttatcttccagattggctcgaggacaacctctctgagggcattcgcgagtggtgggcgctgaaacctggagccccgaagcccaaagccaaccagcaaaagcaggacgacggccggggtctggtgcttcctggctacaagtacctcggacccttcaacggactcgacaagggggagcccgtcaacgcggcggacgcagcggccctcgagcacgacaaggcctacgaccagcagctgcaggcgggtgacaatccgtacctgcggtataaccacgccgacgccgagtttcaggagcgtctgcaagaagatacgtcttttgggggcaacctcgggcgagcagtcttccaggccaagaagtgggttctcgaacctctcggtctggttgaggaaggcgctaagacggctcctggaaagaaacgtccggtagagcagtcgccacaagagccagactcctcctcgggcatcggcaagacaggccagcagcccgctaaaaagagactcaattttggtcagactggcgactcagagtcagtccccgacccacaacctctcggagaacctccagcaacccccgctgctgtgggacctactacaatggcttcaggcggtggcgcaccaatggcagacaataacgaaggcgccgacggagtgggtaatgcctcaggaaattggcattgcgattccacatggctgggcgacagagtcatcaccaccagcacccgcacctgggccttgcccacctacaataaccacctctacaagcaaatctccagtgcttcaacgggggccagcaacgacaaccactacttcggctacagcaccccctgggggtattttgatttcaacagattccactgccatttctcaccacgtgactggcagcgactcatcaacaacaattggggattccggcccaagagactcaacttcaagctcttcaacatccaagtcaaggaggtcacgacgaatgatggcgtcacaaccatcgctaataaccttaccagcacggttcaagtcttctcggactcggagtaccagcttccgtacgtcctcggctctgcgcaccagggctgcctccctccgttcccggcggacgtgttcatgattccgcaatacggctacctgacgctcaacaatggcagccaagccgtgggacgttcatccttttactgcctggaatatttcccttctcagatgctgagaacgggcaacaactttaccttcagctacacctttgaggaagtgcctttccacagcagctacgcgcacagccagagcctggaccggctgatgaatcctctcatcgaccaatacctgtattacctgaacagaactcaaaatcagtccggaagtgcccaaaacaaggacttgctgtttagccgtgggtctccagctggcatgtctgttcagcccaaaaactggctacctggaccctgttatcggcagcagcgcgtttctaaaacaaaaacagacaacaacaacagcaattttacctggactggtgcttcaaaatataacctcaatgggcgtgaatccatcatcaaccctggcactgctatggcctcacacaaagacgacgaagacaagttctttcccatgagcggtgtcatgatttttggaaaggagagcgccggagcttcaaacactgcattggacaatgtcatgatcaccgacgaagaggaaatcaaagccactaaccccgtggccaccgaaagatttgggactgtggcagtcaatctccagagcagcagcacagaccctgcgaccggagatgtgcatgttatgggagccttacctggcatggtgtggcaagatagagacgtgtacctgcagggtcccatttgggccaaaattcctcacacagatggacactttcacccgtctcctcttatgggcggctttggactcaagaacccgcctcctcagatcctcatcaaaaacacgcctgttcctgcgaatcctccggcggagttttcagctacaaagtttgcttcattcatcacccaatactccacaggacaagtgagtgtggaaattgaatgggagctgcagaaagaaaacagcaagcgctggaatcccgaagtgcagtacacatccaattatgcaaaatctgccaacgttgattttactgtggacaacaatggactttatactgagcctcgccccattggcacccgttacctcacccgtcccctgtaa

SEQ ID NO: 371 - protein, 736 aa, Artificial Sequence
  Description of Artificial Sequence: Synthetic polypeptide
MAADGYLPDWLEDNLSEGIREWWALKPGAPKPKANQQKQDDGRGLVLPGYKYLGPFNGLDKGEPVNAADAAALEHDKAYDQQLQAGDNPYLRYNHADAEFQERLQEDTSFGGNLGRAVFQAKKWVLEPLGLVEEGAKTAPGKKRPVEQSPQEPDSSSGIGKTGQQPAKKRLNFGQTGDSESVPDPQPLGEPPATPAAVGPTTMASGGGAPMADNNEGADGVGNASGNWHCDSTWLGDRVITTSTRTWALPTYNNHLYKQISSASTGASNDNHYFGYSTPWGYFDFNRFHCHFSPRDWQRLINNNWGFRPKRLNFKLFNIQVKEVTTNDGVTTIANNLTSTVQVFSDSEYQLPYVLGSAHQGCLPPFPADVFMIPQYGYLTLNNGSQAVGRSSFYCLEYFPSQMLRTGNNFTFSYTFEEVPFHSSYAHSQSLDRLMNPLIDQYLYYLNRTQNQSGSAQNKDLLFSRGSPAGMSVQPKNWLPGPCYRQQRVSKTKTDNNNSNFTWTGASKYNLNGRESIINPGTAMASHKDDEDKFFPMSGVMIFGKESAGASNTALDNVMITDEEEIKATNPVATERFGTVAVNLQSSSTDPATGDVHVMGALPGMVWQDRDVYLQGPIWAKIPHTDGHFHPSPLMGGFGLKNPPPQILIKNTPVPANPPAEFSATKFASFITQYSTGQVSVEIEWELQKENSKRWNPEVQYTSNYAKSANVDFTVDNNGLYTEPRPIGTRYLTRPL

SEQ ID NO: 372 - DNA, 2214 bp, Artificial Sequence
  Description of Artificial Sequence: Synthetic polynucleotide
atggctgccgatggttatcttccagattggctcgaggacaaccttagtgaaggaattcgcgagtggtgggctttgaaacctggagcccctcaacccaaggcaaatcaacaacatcaagacaacgctcgaggtcttgtgcttccgggttacaaataccttggacccggcaacggactcgacaagggggagccggtcaacgcagcagacgcggcggccctcgagcacgacaaggcctacgaccagcagctgcaggcgggtgacaatccgtacctgcggtataaccacgccgacgccgagtttcaggagcgtctgcaagaagatacgtcttttgggggcaaccttggcagagcagtcttccaggccaaaaagaggatccttgagcctcttggtctggttgaggaagcagctaaaacggctcctggaaagaagaggcctgtagatcagtctcctcaggaaccggactcatcatctggtgttggcaaatcgggcaaacagcctgccagaaaaagactaaatttcggtcagactggcgactcagagtcagtcccagaccctcaacctctcggagaaccaccagcagcccccacaagtttgggatctaatacaatggcttcaggcggtggcgcaccaatggcagacaataacgagggtgccgatggggtgggtagttcctcgggaaattggcattgcgattcccaatggctgggggacagagtcatcaccaccagcacccgaacctgggccctgcccacctacaacaatcacctctacaagcaaatctccaacgggacatcgggaggagccaccaacgacaacacctacttcggctacagcaccccctgggggtattttgactttaacagattccactgccacttttcaccacgtgactggcagcgactcatcaacaacaactggggattccggcccaagagactcagcttcaagctcttcaacatccaggtcaaggaggtcacgcagaatgaaggcaccaagaccatcgccaataacctcaccagcaccatccaggtgtttacggactcggagtaccagctgccgtacgttctcggctcggcgcaccagggctgcctccctccgttcccggcggacgtcttcatggtgccacagtatggatacctgacgctcaacaatggcagccaagccgtgggacgttcatccttttactgcctggaatatttcccttctcagatgctgagaacgggcaacaactttaccttcagctacacctttgaggaagtgcctttccacagcagctacgcgcacagccagagcttggaccggctgatgaatcctctgattgaccagtacctgtactacttgtctcggactcaaacaacaggaggcacggcaaatacgcagactctgggcttcagccaaggtgggcctaatacaatggccaatcaggcaaagaactggctgccaggaccctgttaccgccaacaacgcgtctcaacgacaaccgggcaaaacaacaatagcaactttgcctggactgctgggaccaaataccatctgaatggaagaaattcattggctaatcctggcatcgctatggcaacacacaaagacgacgaggagcgtttttttcccagtaacgggatcctgatttttggcaaacaaaatgctgccagagacaatgcggattacagcgatgtcatgctcaccagcgaggaagaaatcaaaaccactaaccctgtggctacagaggaatacggtatcgtggcagataacttgcagcagcaaaacacggctcctcaaattggaactgtcaacagccagggggacttacccggtatggtctggcagaaccgggacgtgtacctgcagggtcccatctgggccaagattcctcacacggacggcaacttccacccgtctccgctgatgggcggctttggcctgaaacatcctccgcctcagatcctgatcaagaacacgcctgtacctgcggatcctccgaccaccttcaaccagtcaaagctgaactctttcatcacgcaatacagcaccggacaggtcagcgtggagatcgagtgggagctgcagaaggaaaacagcaagcgctggaacccggagatccagtacacttccaactattacaagtctaataatgttgaatttgctgttaatactgaaggtgtatatagtgaaccccgccccattggcaccagatacctgactcgtaatctgtaa

SEQ ID NO: 373 - protein, 737 aa, Artificial Sequence
  Description of Artificial Sequence: Synthetic polypeptide
MAADGYLPDWLEDNLSEGIREWWALKPGAPQPKANQQHQDNARGLVLPGYKYLGPGNGLDKGEPVNAADAAALEHDKAYDQQLQAGDNPYLRYNHADAEFQERLQEDTSFGGNLGRAVFQAKKRILEPLGLVEEAAKTAPGKKRPVDQSPQEPDSSSGVGKSGKQPARKRLNFGQTGDSESVPDPQPLGEPPAAPTSLGSNTMASGGGAPMADNNEGADGVGSSSGNWHCDSQWLGDRVITTSTRTWALPTYNNHLYKQISNGTSGGATNDNTYFGYSTPWGYFDFNRFHCHFSPRDWQRLINNNWGFRPKRLSFKLFNIQVKEVTQNEGTKTIANNLTSTIQVFTDSEYQLPYVLGSAHQGCLPPFPADVFMVPQYGYLTLNNGSQAVGRSSFYCLEYFPSQMLRTGNNFTFSYTFEEVPFHSSYAHSQSLDRLMNPLIDQYLYYLSRTQTTGGTANTQTLGFSQGGPNTMANQAKNWLPGPCYRQQRVSTTTGQNNNSNFAWTAGTKYHLNGRNSLANPGIAMATHKDDEERFFPSNGILIFGKQNAARDNADYSDVMLTSEEEIKTTNPVATEEYGIVADNLQQQNTAPQIGTVNSQGDLPGMVWQNRDVYLQGPIWAKIPHTDGNFHPSPLMGGFGLKHPPPQILIKNTPVPADPPTTFNQSKLNSFITQYSTGQVSVEIEWELQKENSKRWNPEIQYTSNYYKSNNVEFAVNTEGVYSEPRPIGTRYLTRNL

SEQ ID NO: 374 - DNA, 2205 bp, Artificial Sequence
  Description of Artificial Sequence: Synthetic polynucleotide
atggctgctgacggttatcttccagattggctcgaggacaacctttctgaaggcattcgtgagtggtgggctctgaaacctggagtccctcaacccaaagcgaaccaacaacaccaggacaactgtcggggtcttgtgcttccgggttacaaatacctcggacccggtaacggactcgacaaaggagagccggtcaacgaggcggacgcggcagccctcgaacacgacaaggcctacgaccagcagctcaaggccggagacaacccgtacctcaagtacaaccacgccgacgccgagttccaggagcggctcaaagaagatacgtcttttgggggcaacctcgggcgagcagtcttccagaccaaaaagaggcttcttgaacctcttggtctggttgaggaagcggctaagacggctcctggaaagaagaggcctgtagagcagtctcctcaggaaccggactcctccgcgggtattggcaaatcgggtgcacagcccgctaaaaagagactcaatttcggtcagactggcgacacagagtcagtcccagaccctcaaccaatcggagaacctcccgcagccccctcaggtgtgggatctcttacaatggcttcaggtggtggcgcaccagtggcagacaataacgaaggtgccgatggagtgggtagttcctcgggaaattggcattgcgattcccaatggctgggggacagagtcatcaccaccagcacccgaacctgggccctgcccacctacaacaaccacctctacaaacaaatttccagccaatcaggagcctcgaacgacaatcactactttggctacagcaccccttgggggtattttgacttcaacagattccactgccacttttcaccacgtgactggcagcgactcatcaacaacaactggggattccggcccaagagactcagcttcaagctcttcaacatccaggtcaaagaggttacggacaacaatggagtcaagaccatcgccaataaccttaccagcacggtccaggtcttcacggactcagactatcagctcccgtacgtgctcgggtcggctcacgagggctgcctcccgccgttcccagcggacgttttcatgattcctcagtacgggtatctgacgcttaatgatggaagccaggccgtgggtcgttcgtccttttactgcctggaatatttcccgtcgcaaatgctaagaacgggtaacaacttccagttcagctacgagtttgagaacgtacctttccatagcagctacgctcacagccaaagcctggaccgactaatgaatccactcatcgaccaatacttgtactatctctcaaagactattaacggttctggacagaatcaacaaacgctaaaattcagtgtggccggacccagcaacatggctgtccagggaagaaactacatacctggacccagctaccgacaacaacgtgtctcaaccactgtgactcaaaacaacaacagcgaatttgcttggcctggagcttcttcttgggctctcaatggacgtaatagcttgatgaatcctggacctgctatggccagccacaaagaaggagaggaccgtttctttcctttgtctggatctttaatttttggcaaacaaggaactggaagagacaacgtggatgcggacaaagtcatgataaccaacgaagaagaaattaaaactactaacccggtagcaacggagtcctatggacaagtggccacaaaccaccagagtgcccaagcacaggcgcagaccggctgggttcaaaaccaaggaatacttccgggtatggtttggcaggacagagatgtgtacctgcaaggacccatctgggccaagattcctcacacggacggcaacttccacccgtctccgctgatgggcggctttggcctgaaacatcctccgcctcagatcctgatcaagaacacgcctgttcctgcgaatcctccggcggagttttcagctacaaagtttgcttcattcatcacccagtactccacaggacaagtgagtgtggaaattgaatgggagctgcagaaagaaaacagcaagcgctggaatcccgaagtgcagtacacatccaattatgcaaaatctgccaacgttgattttactgtggacaacaatggactttatactgagcctcgccccattggcacccgttaccttaccaaacctctgtaa

SEQ ID NO: 375 - protein, 734 aa, Artificial Sequence
  Description of Artificial Sequence: Synthetic polypeptide
MAADGYLPDWLEDNLSEGIREWWALKPGVPQPKANQQHQDNCRGLVLPGYKYLGPGNGLDKGEPVNEADAAALEHDKAYDQQLKAGDNPYLKYNHADAEFQERLKEDTSFGGNLGRAVFQTKKRLLEPLGLVEEAAKTAPGKKRPVEQSPQEPDSSAGIGKSGAQPAKKRLNFGQTGDTESVPDPQPIGEPPAAPSGVGSLTMASGGGAPVADNNEGADGVGSSSGNWHCDSQWLGDRVITTSTRTWALPTYNNHLYKQISSQSGASNDNHYFGYSTPWGYFDFNRFHCHFSPRDWQRLINNNWGFRPKRLSFKLFNIQVKEVTDNNGVKTIANNLTSTVQVFTDSDYQLPYVLGSAHEGCLPPFPADVFMIPQYGYLTLNDGSQAVGRSSFYCLEYFPSQMLRTGNNFQFSYEFENVPFHSSYAHSQSLDRLMNPLIDQYLYYLSKTINGSGQNQQTLKFSVAGPSNMAVQGRNYIPGPSYRQQRVSTTVTQNNNSEFAWPGASSWALNGRNSLMNPGPAMASHKEGEDRFFPLSGSLIFGKQGTGRDNVDADKVMITNEEEIKTTNPVATESYGQVATNHQSAQAQAQTGWVQNQGILPGMVWQDRDVYLQGPIWAKIPHTDGNFHPSPLMGGFGLKHPPPQILIKNTPVPANPPAEFSATKFASFITQYSTGQVSVEIEWELQKENSKRWNPEVQYTSNYAKSANVDFTVDNNGLYTEPRPIGTRYLTKPL

SEQ ID NO: 376 - DNA, 2211 bp, Artificial Sequence
  Description of Artificial Sequence: Synthetic polynucleotide
atggctgccgatggttatcttccagattggctcgaggacaacctctctgagggcattcgcgagtggtgggacttgaaacctggagcccctaaacccaaggcaaatcaacaacatcaggacaacgctcgaggtcttgtgcttccgggttacaaataccttggacccggcaacggactcgacaagggggagccggtcaacgcagcagacgcggcggccctcgagcacgacaaggcctacgaccagcagctcaaggccggagacaacccgtacctcaagtacaaccacgccgacgccgagttccaggagcggctcaaagaagatacgtcttttgggggcaacctcgggcgagcagtcttccaggccaaaaagaggcttcttgaacctcttggtctggttgaggaagcggctaagacggctcctggaaagaagagaccggtagagccatcaccccagcgttctccagactcctctacgggcatcggcaagaaaggccaacagcccgctaaaaagagactcaattttggtcagactggcgactcagagtcagtccccgacccacaacctctcggagaacctccagcaacccccgctgctgtgggacctactacaatggcttcaggcggtggcgcaccaatggcagacaataacgagggtgccgatggagtgggtaattcctcaggaaattggcattgcgattcccaatggctgggcgacagagtcatcaccaccagcaccagaacctgggccctgcccacttacaacaaccatctctacaagcaaatctccagccaatcaggagcttcaaacgacaaccactactttggctacagcaccccttgggggtattttgactttaacagattccactgccacttttcaccacgtgactggcaaagactcatcaacaacaactggggattccgacccaagagactcaacttcaagctcttcaacatccaagtcaaggaggtcacgacgaatgatggcgtcacgaccatcgctaataaccttaccagcacggttcaagtcttctcggactcggagtaccagttgccgtacgtcctcggctctgcgcaccagggctgcctccctccgttcccggcggacgtgttcatgattccgcagtacggctacctaacgctcaacaatggcagccaagccgtgggacgttcatccttttactgcctggaatatttcccttctcagatgctgagaacgggcaacaactttaccttcagctacacttttgaggacgttcctttccacagcagctacgctcacagccagagtctggaccgtctcatgaatcctctcatcgaccagtacctgtattacttgagcagaacaaacactccaagtggaaccaccacgcagtcaaggcttcagttttctcaggccggagcgagtgacattcgggaccagtctaggaactggcttcctggaccctgttaccgccagcagcgcgtttctaaaacaaaaacagacaacaacaacagcaattttacctggactggtgcttcaaaatataaccttaatgggcgtgaatctataatcaaccctggcactgctatggcctcacacaaagacgacgaagacaagttctttcccatgagcggtgtcatgatttttggaaaagagagcgccggagcttcaaacactgcattggacaatgtcatgatcacagacgaagaggaaatcaaagccactaaccccgtggccaccgaaagatttgggactgtggcagtcaatctccagagcagcagcacagaccctgcgaccggagatgtgcatgttatgggagcattacctggcatggtgtggcaagatagagacgtgtacctgcagggtcccatttgggccaaaattcctcacacagatggacactttcacccgtctcctcttatgggcggctttggactcaagaacccgcctcctcagatcctcatcaaaaacacgcctgttcctgcgaatcctccggcggagttttcagctacaaagtttgcttcattcatcacccaatactccacaggacaagtgagtgtggaaattgaatgggagctgcagaaagaaaacagcaagcgctggaatcccgaagtgcagtacacatccaattatgcaaaatctgccaacgttgattttactgtggacaacaatggactttatactgagcctcgccccattggcacccgttaccttacccgtcccctgtaa

SEQ ID NO: 377 - protein, 736 aa, Artificial Sequence
  Description of Artificial Sequence: Synthetic polypeptide
MAADGYLPDWLEDNLSEGIREWWDLKPGAPKPKANQQHQDNARGLVLPGYKYLGPGNGLDKGEPVNAADAAALEHDKAYDQQLKAGDNPYLKYNHADAEFQERLKEDTSFGGNLGRAVFQAKKRLLEPLGLVEEAAKTAPGKKRPVEPSPQRSPDSSTGIGKKGQQPAKKRLNFGQTGDSESVPDPQPLGEPPATPAAVGPTTMASGGGAPMADNNEGADGVGNSSGNWHCDSQWLGDRVITTSTRTWALPTYNNHLYKQISSQSGASNDNHYFGYSTPWGYFDFNRFHCHFSPRDWQRLINNNWGFRPKRLNFKLFNIQVKEVTTNDGVTTIANNLTSTVQVFSDSEYQLPYVLGSAHQGCLPPFPADVFMIPQYGYLTLNNGSQAVGRSSFYCLEYFPSQMLRTGNNFTFSYTFEDVPFHSSYAHSQSLDRLMNPLIDQYLYYLSRTNTPSGTTTQSRLQFSQAGASDIRDQSRNWLPGPCYRQQRVSKTKTDNNNSNFTWTGASKYNLNGRESIINPGTAMASHKDDEDKFFPMSGVMIFGKESAGASNTALDNVMITDEEEIKATNPVATERFGTVAVNLQSSSTDPATGDVHVMGALPGMVWQDRDVYLQGPIWAKIPHTDGHFHPSPLMGGFGLKNPPPQILIKNTPVPANPPAEFSATKFASFITQYSTGQVSVEIEWELQKENSKRWNPEVQYTSNYAKSANVDFTVDNNGLYTEPRPIGTRYLTRPL

SEQ ID NO: 378 - DNA, 2214 bp, Artificial Sequence; identical to SEQ ID NO: 350
  Description of Artificial Sequence: Synthetic polynucleotide

SEQ ID NO: 379 - protein, 737 aa, Artificial Sequence; identical to SEQ ID NO: 351
  Description of Artificial Sequence: Synthetic polypeptide

SEQ ID NO: 380 - DNA, 2205 bp, Artificial Sequence
  Description of Artificial Sequence: Synthetic polynucleotide
atggctgctgacggttatcttccagattggctcgaggacaacctttctgaaggcattcgtgagtggtgggctctgaaacctggagtccctcaacccaaagcgaaccaacaacaccaggacaaccgtcggggtcttgtgcttccgggttacaaatacctcggacccggtaacggactcgacaaaggagagccggtcaacgaggcggacgcggcagccctcgaacacgacaaggcctacgaccagcagctcaaggccggagacaacccgtacctcaagtacaaccacgccgacgccgagttccaggagcggctcaaagaagatacgtcttttgggggcaacctcgggcgagcagtcttccaggccaaaaagaggcttcttgaacctcttggtctggttgaggaagcggctaagacggctcctggaaagaagaggcctgtagagcagtctcctcaggaaccggactcctccgcgggtattggcaaatcgggtgcacagcccgctaaaaagagactcaatttcggtcagactggcgacacagagtcagtcccagaccctcaaccaatcggagaacctcccgcagccccctcaggtgtgggatctcttacaatggcttcaggtggtggcgcaccagtggcagacaataacgaaggtgccgatggagtgggtagttcctcgggaaattggcattgcgattcccaatggctgggggacagagtcatcaccaccagcacccgaacctgggccctgcccacctacaacaaccacctctacaaacaaatttccagccaatcaggagcctcgaacgacaatcactactttggctacagcaccccttgggggtattttgacttcaacagattccactgccacttttcaccacgtgactggcagcgactcatcaacaacaactggggattccggcccaagagactcagcttcaagctcttcaacatccaggtcaaagaggttacggacaacaatggagtcaagaccatcgccaataaccttaccagcacggtccaggtcttcacggactcagactatcagctcccgtacgtgctcgggtcggctcacgagggctgcctcccgccgttcccagcggacgttttcatgattcctcagtacgggtatctgacgcttaatgatggaagccaggccgtgggtcgttcgtccttttactgcctggaatatttcccgtcgcaaatgctaagaacgggtaacaacttccagttcagctacgagtttgagaacgtacctttccatagcagctacgctcacagccaaagcctggaccgactaatgaatccactcatcgaccaatacttgtactatctctcaaagactattaacggttctggacagaatcaacaaacgctaaaattcagtgtggccggacccagcaacatggctgtccagggaagaaactacatacctggacccagctaccgacaacaacgtgtctcaaccactgtgactcaaaacaacaacagcgaatttgcttggcctggagcttcttcttgggctctcaatggacgtaatagcttgatgaatcctggacctgctatggccagccacaaagaaggagaggaccgtttctttcctttgtctggatctttaatttttggcaaacaaggaactggaagagacaacgtggatgcggacaaagtcatgataaccaacgaagaagaaattaaaactactaacccggtagcaacggagtcctatggacaagtggccacaaaccaccagagtgcccaagcacaggcgcagaccggctgggttcaaaaccaaggaatacttccgggtatggtttggcaggacagagatgtgtacctgcaaggacccatttgggccaaaattcctcacacggacggcaactttcacccttctccgctgatgggagggtttggaatgaaacacccgcctcctcagatcctcatcaaaaacacacctgtacctgcggatcctccaacggccttcaacaaggacaagctgaactctttcatcacccagtattctactggccaagtcagcgtggagatcgagtgggagctgcagaaggaaaacagcaagcgctggaaccccgagatccagtacacctccaactactacaaatctacaagtgtggactttgctgttaatacagaaggcgtgtactctgaaccccgccccattggcacccgttacctcacccgtaatctgtaa

SEQ ID NO: 381 - protein, 734 aa, Artificial Sequence
  Description of Artificial Sequence: Synthetic polypeptide
MAADGYLPDWLEDNLSEGIREWWALKPGVPQPKANQQHQDNRRGLVLPGYKYLGPGNGLDKGEPVNEADAAALEHDKAYDQQLKAGDNPYLKYNHADAEFQERLKEDTSFGGNLGRAVFQAKKRLLEPLGLVEEAAKTAPGKKRPVEQSPQEPDSSAGIGKSGAQPAKKRLNFGQTGDTESVPDPQPIGEPPAAPSGVGSLTMASGGGAPVADNNEGADGVGSSSGNWHCDSQWLGDRVITTSTRTWALPTYNNHLYKQISSQSGASNDNHYFGYSTPWGYFDFNRFHCHFSPRDWQRLINNNWGFRPKRLSFKLFNIQVKEVTDNNGVKTIANNLTSTVQVFTDSDYQLPYVLGSAHEGCLPPFPADVFMIPQYGYLTLNDGSQAVGRSSFYCLEYFPSQMLRTGNNFQFSYEFENVPFHSSYAHSQSLDRLMNPLIDQYLYYLSKTINGSGQNQQTLKFSVAGPSNMAVQGRNYIPGPSYRQQRVSTTVTQNNNSEFAWPGASSWALNGRNSLMNPGPAMASHKEGEDRFFPLSGSLIFGKQGTGRDNVDADKVMITNEEEIKTTNPVATESYGQVATNHQSAQAQAQTGWVQNQGILPGMVWQDRDVYLQGPIWAKIPHTDGNFHPSPLMGGFGMKHPPPQILIKNTPVPADPPTAFNKDKLNSFITQYSTGQVSVEIEWELQKENSKRWNPEIQYTSNYYKSTSVDFAVNTEGVYSEPRPIGTRYLTRNL

SEQ ID NO: 382 - DNA, 2217 bp, Artificial Sequence
  Description of Artificial Sequence: Synthetic polynucleotide
atggctgccgatggttatcttccagattggctcgaggacaacctctctgagggcattcgcgagtggtgggcgctgaaacctggagccccgaagcccaaagccaaccagcaaaagcaggacgacggccggggtctggtgcttcctggctacaagtacctcggacccttcaacggactcgacaagggggagcccgtcaacgcggcggacgcagcggccctcgagcacgacaaggcctacgaccagcagctgcaggcgggtgacaatccgtacctgcggtataaccacgccgacgccgagtttcaggagcgtctgcaagaagatacgtcttttgggggcaacctcgggcgagcagtcttccaggccaagaagcgggttctcgaacctctcggtctggttgaggaaggcgctaagacggctcctggaaagaagagaccggtagagccatcaccccagcgttctccagactcctctacgggcatcggcaagaaaggccaacagcccgccagaaaaagactcaattttggtcagactggcgactcagagtcagttccagaccctcaacctctcggagaacctccagcagcgccctctggtgtgggacctaatacaatggctgcaggcggtggcgcaccaatggcagacaataacgaaggcgccgacggagtgggtagttcctcgggaaattggcattgcgattccacatggctgggcgacagagtcatcaccaccagcacccgaacctgggccctgcccacctacaacaaccacctctacaagcaaatctccaacgggacatcgggaggagccaccaacgacaacacctacttcggctacagcaccccctgggggtattttgactttaacagattccactgccacttttcaccacgtgactggcagcgactcatcaacaacaactggggattccggcccaagagactcagcttcaagctcttcaacatccaggtcaaggaggtcacgcagaatgaaggcaccaagaccatcgccaataacctcaccagcaccatccaggtgtttacggactcggagtaccagctgccgtacgttctcggctctgcccaccagggctgcctgcctccgttcccggcggacgtgttcatgattccccagtacggctacctaacactcaacaacggtagtcaggccgtgggacgctcctccttctactgcctggaatactttccttcgcagatgctgagaaccggcaacaacttccagtttacttacaccttcgaggacgtgcctttccacagcagctacgcccacagccagagcttggaccggctgatgaatcctctgattgaccagtacctgtactacttgtctcggactcaaacaacaggaggcacggcaaatacgcagactctgggcttcagccaaggtgggcctaatacaatggccaatcaggcaaagaactggctgccaggaccctgttaccgccaacaacgcgtctcaacgacaaccgggcaaaacaacaatagcaactttgcctggactgctgggaccaaataccatctgaatggaagaaattcattggctaatcctggcatcgctatggcaacacacaaagacgacgaggagcgtttttttcccagtaacgggatcctgatttttggcaaacaaaatgctgccagagacaatgcggattacagcgatgtcatgctcaccagcgaggaagaaatcaaaaccactaaccctgtggctacagaggaatacggtatcgtggcagataacttgcagcagcaaaacacggctcctcaaattggaactgtcaacagccagggggccttacccggtatggtctggcagaaccgggacgtgtacctgcagggtcccatctgggccaagattcctcacacggacggcaacttccacccctctcccctcatgggtggattcggacttaaacatcctccgcctcagatcctgatcaagaacacgcctgtacctgcggatcctccgaccaccttcaaccagtcaaagctgaactctttcatcacgcaatacagcaccggacaggtcagcgtggaaattgaatgggagctgcagaaggaaaacagcaagcgctggaaccccgagatccagtacacctccaactactacaaatctacaagtgtggactttgctgttaatacagaaggcgtgtactctgaaccccgccccattggcacccgttacctcacccgtaatctgtaa

SEQ ID NO: 383 - protein, 738 aa, Artificial Sequence; identical to SEQ ID NO: 129
  Description of Artificial Sequence: Synthetic polypeptide

SEQ ID NO: 384 - DNA, 2211 bp, Artificial Sequence
  Description of Artificial Sequence: Synthetic polynucleotide
atggctgctgacggttatcttccagattggctcgaggacaacctttctgaaggcattcgagagtggtgggcgctgcaacctggagcccctaaacccaaggcaaatcaacaacatcaggacaacgctcggggtcttgtgcttccgggttacaaatacctcggacccggcaacggactcgacaagggggaacccgtcaacgcagcggacgcggcagccctcgagcacgacaaggcctacgaccagcagctcaaggccggtgacaacccctacctcaagtacaaccacgccgacgccgagttccaggagcggctcaaagaagatacgtcttttgggggcaacctcgggcgagcagtcttccaggccaaaaagaggcttcttgaacctcttggtctggttgaggaagcggctaagacggctcctggaaagaagaggcctgtagatcagtctcctcaggaaccggactcatcatctggtgttggcaaatcgggcaaacagcctgccagaaaaagactaaatttcggtcagactggcgactcagagtcagtcccagaccctcaacctctcggagaaccaccagcagcccccacaagtttgggatctaatacaatggcttcaggcggtggcgcaccaatggcagacaataacgagggtgccgatggagtgggtaattcctcaggaaattggcattgcgattcccaatggctgggcgacagagtcatcaccaccagcaccagaacctgggccctgcccacttacaacaaccatctctacaagcaaatctccagccaatcaggagcttcaaacgacaaccactactttggctacagcaccccttgggggtattttgactttaacagattccactgccacttctcaccacgtgactggcagcgactcattaacaacaactggggattccggcccaagaaactcagcttcaagctcttcaacatccaagttaaagaggtcacgcagaacgatggcacgacgactattgccaataaccttaccagcacggttcaggtgtttacggactcggagtatcagctcccgtacgtgctcgggtcggcgcaccaaggctgtctcccgccgtttccagcggacgtcttcatggtccctcagtatggatacctcaccctgaacaacggaagtcaagcggtgggacgctcatccttttactgcctggagtacttcccttcgcagatgctaaggactggaaataacttccaattcagctataccttcgaggatgtaccttttcacagcagctacgctcacagccagagtttggatcgcttgatgaatcctcttattgatcagtatctgtactacctgaacagaacgcaaggaacaacctctggaacaaccaaccaatcacggctgctttttagccaggctgggcctcagtctatgtctttgcaggccagaaattggctacctgggccctgctaccggcaacagagactttcaaagactgctaacgacaacaacaacagtaactttccttggacagcggccagcaaatatcatctcaatggccgcgactcgctggtgaatccaggaccagctatggccagtcacaaggacgatgaagaaaaatttttccctatgcacggcaatctaatatttggcaaagaagggacaacggcaagtaacgcagaattagataatgtaatgattacggatgaagaagagattcgtaccaccaatcctgtggcaacagagcagtatggaactgtggcaaataacttgcagagctcaaatacagctcccacgactagaactgtcaatgatcagggggccttacctggcatggtgtggcaagatcgtgacgtgtaccttcaaggacctatctgggcaaagattcctcacacggatggacactttcatccttctcctctgatgggaggctttggactgaaacatccgcctcctcaaatcatgatcaaaaatactccggtaccggcaaatcctccgacgactttcagcccggccaagtttgcttcatttatcactcagtactccactggacaggtcagcgtggaaattgagtgggagctacagaaagaaaacagcaaacgttggaatccagagattcagtacacttccaactacaacaagtctgttaatgtggactttactgtagacactaatggtgtttatagtgaacctcgccccattggcacccgttaccttacccgtcccctgtaa

SEQ ID NO: 385 - protein, 736 aa, Artificial Sequence; identical to SEQ ID NO: 355
  Description of Artificial Sequence: Synthetic polypeptide

SEQ ID NO: 386 - DNA, 2211 bp, Artificial Sequence; identical to SEQ ID NO: 354
  Description of Artificial Sequence: Synthetic polynucleotide

SEQ ID NO: 387 - protein, 736 aa, Artificial Sequence; identical to SEQ ID NO: 355
  Description of Artificial Sequence: Synthetic polypeptide

SEQ ID NO: 388 - DNA, 2211 bp, Artificial Sequence
  Description of Artificial Sequence: Synthetic polynucleotide
atggctgctgacggttatcttccagattggctcgaggacaacctttctgaaggcattcgtgagtggtgggctctgaaacctggagtccctcaacccaaagcgaaccaacaacaccaggacaaccgtcggggtcttgtgcttccgggttacaaatacctcggacccggtaacggactcgacaaaggagagcccgtcaacgcggcggatgcagcggccctcgagcacgacaaggcctacgaccagcagctcaaagcgggtgacaatccgtacctgcggtataaccacgccgacgccgagtttcaggagcgtctgcaagaagatacgtcttttgggggcaacctcgggcgagcagtcttccaggccaagaagagggttctcgaaccttttggtctggttgaggaaggtgctaagacggctcctggaaagaaacgtccggtagagcagtcgccacaagagccagactcctcctcgggcatcggcaagacaggccagcagcccgctaaaaagagactcaattttggtcagactggcgactcagagtcagtccccgacccacaacctctcggagaacctccagcaacccccgctgctgtgggacctactacaatggcttcaggcggtggcgcaccaatggcagacaataacgaaggcgccgacggagtgggtaatgcctcaggaaattggcattgcgattccacatggctgggcgacagagtcatcaccaccagcacccgcacctgggccttgcccacctacaataaccacctctacaagcaaatctccagtgcttcaacgggggccagcaacgacaaccactacttcggctacagcaccccctgggggtattttgatttcaacagattccactgccatttctcaccacgtgactggcagcgactcatcaacaacaattggggattccggcccaagagactcaacttcaagctcttcaacatccaagtcaaggaggtcacgacgaatgatggcgtcacgaccatcgctaataaccttaccagcacggttcaagtcttctcggactcggagtaccagcttccgtacgtcctcggctctgcgcaccagggctgcctccctccgttcccggcggacgtgttcatgattccgcaatacggctacctgacgctcaacaatggcagccaagccgtgggacgttcatccttttactgcctggaatatttcccttctcagatgctgagaacgggcaacaactttaccttcagctacacctttgaggaagtgcctttccacagcagctacgcgcacagccagagcctggaccggctgatgaatcctctcatcgaccaatacctgtattacctgaacagaactcaaaatcagtccggaagtgcccaaaacaaggacttgctgtttagccgtgggtctccagctggcatgtctgttcagcccaaaaactggctacctggaccctgttatcggcagcagcgcgtttctaaaacaaaaacagacaacaacaacagcaattttacctggactggtgcttcaaaatataacctcaatgggcgtgaatccatcatcaaccctggcactgctatggcctcacacaaagacgacgaagacaagttctttcccatgagcggtgtcatgatttttggaaaagagagcgccggagcttcaaacactgcattggacaatgtcatgattacagacgaagaggaaattaaagccactaaccctgtggccaccgaaagatttgggaccgtggcagtcaatttccagagcagcagcacagaccctgcgaccggagatgtgcatgttatgggagccttacctggaatggtgtggcaagacagagacgtatacctgcagggtcctatttgggccaaaattcctcacacggatggacactttcacccgtctcctctcatgggcggctttggacttaagcacccgcctcctcagatcctcatcaaaaacacgcctgttcctgcgaatcctccggcagagttttcggctacaaagtttgcttcattcatcacccagtattccacaggacaagtgagcgtggagattgaatgggagctgcagaaagaaaacagcaaacgctggaatcccgaagtgcagtatacatctaactatgcaaaatctgccaacgttgatttcactgtggacaacaatggactttatactgagcctcgccccattggcacccgttacctcacccgtcccctgtaa

SEQ ID NO: 389 - protein, 736 aa, Artificial Sequence
  Description of Artificial Sequence: Synthetic polypeptide
MAADGYLPDWLEDNLSEGIREWWALKPGVPQPKANQQHQDNRRGLVLPGYKYLGPGNGLDKGEPVNAADAAALEHDKAYDQQLKAGDNPYLRYNHADAEFQERLQEDTSFGGNLGRAVFQAKKRVLEPFGLVEEGAKTAPGKKRPVEQSPQEPDSSSGIGKTGQQPAKKRLNFGQTGDSESVPDPQPLGEPPATPAAVGPTTMASGGGAPMADNNEGADGVGNASGNWHCDSTWLGDRVITTSTRTWALPTYNNHLYKQISSASTGASNDNHYFGYSTPWGYFDFNRFHCHFSPRDWQRLINNNWGFRPKRLNFKLFNIQVKEVTTNDGVTTIANNLTSTVQVFSDSEYQLPYVLGSAHQGCLPPFPADVFMIPQYGYLTLNNGSQAVGRSSFYCLEYFPSQMLRTGNNFTFSYTFEEVPFHSSYAHSQSLDRLMNPLIDQYLYYLNRTQNQSGSAQNKDLLFSRGSPAGMSVQPKNWLPGPCYRQQRVSKTKTDNNNSNFTWTGASKYNLNGRESIINPGTAMASHKDDEDKFFPMSGVMIFGKESAGASNTALDNVMITDEEEIKATNPVATERFGTVAVNFQSSSTDPATGDVHVMGALPGMVWQDRDVYLQGPIWAKIPHTDGHFHPSPLMGGFGLKHPPPQILIKNTPVPANPPAEFSATKFASFITQYSTGQVSVEIEWELQKENSKRWNPEVQYTSNYAKSANVDFTVDNNGLYTEPRPIGTRYLTRPL

SEQ ID NO: 390 - DNA, 2217 bp, Artificial Sequence
  Description of Artificial Sequence: Synthetic polynucleotide
atggctgccgatggttatcttccagattggctcgaggacaacctctctgagggcattcgcgagtggtgggacttgaaacctggagccccgaaacccaaagccaaccagcaaaagcaggacgacggccggggtctggtgcttcctggctacaagtacctcggacccttcaacggactcgacaagggggagcccgtcaacgcggcggatgcaacggccctcgagcacgacaaggcctacgaccagcagctgcaggcgggtgacaatccgtacctgcggtataaccacgccgacgccgagtttcaggagcgtctgcaagaagatacgtcttttgggggcaacctcgggcgagcagtcttccaggccaagaagcgggttctcgaacctctcggtctggttgaggaaggcgctaagacggctcctggaaagaagagaccggtagagccatcaccccagcgttctccagactcctctacgggcatcggcaagaaaggccaacagcccgccagaaaaagactcaattttggtcagactggcgactcagagtcagttccagaccctcaacctctcggagaaccaccagcagcccccacaagtttgggatctaatacaatggcttcaggcggtggcgcaccaatggcagacaataacgagggtgccgatggagtgggtaattcctcaggaaattggcattgcgattcccaatggctgggcgacagagtcatcaccaccagcacccgcacctgggccttgcccacctacaataaccacctctacaagcaaatctccagtgcttcaacgggggccagcaacgacaaccactacttcggctacagcaccccctgggggtattttgactttaaccgcttccactgccacttctcgccaagagactggcaaagactcatcaacaacaattggggattccggcccaagagactcaacttcaaactcttcaacatccaagtcaaggaggtcacgacgaatgatggcgtcacgaccatcgccaataacctcaccagcaccatccaggtgtttacggactcggagtaccagctgccgtacgttctcggctctgcccaccagggctgcctgcctccgttcccggcggacgtgttcatgattccccagtatggatacctcaccctgaacaacggaagtcaagcggtgggacgctcatccttttactgcctggagtacttcccttcgcagatgctaaggactggaaataacttccaattcagctataccttcgaggatgtaccttttcacagcagctacgctcacagccagagtttggatcgcttgatgaatcctcttattgatcagtatctgtactacctgaacagaacgcaaggaacaacctctggaacaaccaaccaatcacggctgctttttagccaggctgggcctcagtctatgtctttgcaggccagaaattggctacctgggccctgctaccggcaacagagactttcaaagactgctaacgacaacaacaacagtaactttccttggacagcagccagcaaatatcatctcaatggccgcgactcgctggtgaatccaggaccagctatggccagtcacaaggacgatgaagaaaaatttttccctatgcacggcaatctaatatttggcaaagaagggacaacggcaagtaacgcagaattagataatgtaatgattacggatgaagaagagattcgtaccaccaatcctgtggcaacagagcagtatggaactgtggcaaataacttgcagagctcaaatacagctcccacgactagaactgtcaatgatcagggggccttacctggcatggtgtggcaagatcgtgacgtgtaccttcaggggcccatctgggcaaagattccacacacggacggacattttcacccctctcccctcatgggtggattcggacttaaacaccctcctccgcagattctcatcaagaacaccccggtacctgcgaatccttcgaccaccttcagtgcggcaaagtttgcttccttcatcacacagtactccacgggacaggtcagcgtggagatcgagtgggagctgcagaaggaaaacagcaagcgctggaacccggagatccagtacacttccaactattacaagtctaataatgttgaatttgctgttaatactgaaggtgtatatagtgaaccccgccccattggcaccagatacctgactcgtaatctgtaa

SEQ ID NO: 391 - protein, 738 aa, Artificial Sequence
  Description of Artificial Sequence: Synthetic polypeptide
MAADGYLPDWLEDNLSEGIREWWDLKPGAPKPKANQQKQDDGRGLVLPGYKYLGPFNGLDKGEPVNAADATALEHDKAYDQQLQAGDNPYLRYNHADAEFQERLQEDTSFGGNLGRAVFQAKKRVLEPLGLVEEGAKTAPGKKRPVEPSPQRSPDSSTGIGKKGQQPARKRLNFGQTGDSESVPDPQPLGEPPAAPTSLGSNTMASGGGAPMADNNEGADGVGNSSGNWHCDSQWLGDRVITTSTRTWALPTYNNHLYKQISSASTGASNDNHYFGYSTPWGYFDFNRFHCHFSPRDWQRLINNNWGFRPKRLNFKLFNIQVKEVTTNDGVTTIANNLTSTIQVFTDSEYQLPYVLGSAHQGCLPPFPADVFMIPQYGYLTLNNGSQAVGRSSFYCLEYFPSQMLRTGNNFQFSYTFEDVPFHSSYAHSQSLDRLMNPLIDQYLYYLNRTQGTTSGTTNQSRLLFSQAGPQSMSLQARNWLPGPCYRQQRLSKTANDNNNSNFPWTAASKYHLNGRDSLVNPGPAMASHKDDEEKFFPMHGNLIFGKEGTTASNAELDNVMITDEEEIRTTNPVATEQYGTVANNLQSSNTAPTTRTVNDQGALPGMVWQDRDVYLQGPIWAKIPHTDGHFHPSPLMGGFGLKHPPPQILIKNTPVPANPSTTFSAAKFASFITQYSTGQVSVEIEWELQKENSKRWNPEIQYTSNYYKSNNVEFAVNTEGVYSEPRPIGTRYLTRNL

SEQ ID NO: 392 - DNA, 2208 bp, Artificial Sequence
  Description of Artificial Sequence: Synthetic polynucleotide
atggctgccgatggttatcttccagattggctcgaggacaaccttagtgaaggaattcgcgagtggtgggacttgaaacctggagccccgaagcccaaagccaaccagcaaaagcaggacgacggccggggtctggtgcttcctggctacaagtacctcggacccttcaacggactcgacaagggggagcccgtcaacgcggcggacgcagcggccctcgagcacgacaaggcctacgaccagcagctcaaagcgggtgacaatccgtacctgcggtataaccacgccgacgccgagtttcaggagcgtctgcaagaagatacgtcttttgggggcaacctcgggcgagcagtcttccaggccaagaagcgggttctcgaacctctcggtctggttgaggaaggtgctaagacggctcctggaaagaaacgtccggtagagcagtcgccacaagagccagactcctcctcgggcattggcaagacaggccagcagcccgctaaaaagagactcaattttggtcagactggcgactcagagtcagtccccgacccacaacctctcggagaacctccagcaacccccgctgctgtgggacctactacaatggcttcaggcggtggcgcaccaatggcagacaataacgaaggcgccgacggagtgggtaatgcctcaggaaattggcattgcgattccacatggctgggcgacagagtcatcaccaccagcacccgaacctgggccctgcccacctacaacaaccacctctacaaacaaatttccagccaatcaggagcctcgaacgacaatcactactttggctacagcaccccttgggggtattttgatttcaacagattccactgccacttttcaccacgtgactggcagcgactcatcaacaacaattggggattccggcccaagagactcagcttcaagctcttcaacatccaggtcaaggaggtcacgcagaatgaaggcaccaagaccatcgccaataaccttaccagcacggttcaagtgtttacggactcggagtatcagctcccgtacgtgctcggctcggcgcatcaaggatgcctcccgccgttcccagcagacgtcttcatggtgccacagtatggatacctcaccctgaacaacgggagtcaggcagtaggacgctcttcattttactgcctggagtactttccttctcagatgctgcgtaccggaaacaactttaccttcagctacacttttgaggacgttcctttccacagcagctacgctcacagccagagtctggaccgtctcatgaatcctctgattgaccagtacctgtattacttgagcagaacaaacactccaagtggaaccaccacgcagtcaaggcttcagttttctcaggccggagcgagtgacattcgggaccagtctaggaactggcttcctggaccctgttaccgccagcagcgagtatcaaagacatctgcggataacaacaacagtgaatactcgtggactggagctaccaagtaccacctcaatggcagagactctctggtgaatccgggcccggccatggcaagccacaaggactatgaagaaaagttttttcctcagagcggggttctcatctttgggaagcaaggctcagagaaaacaaatgtggacattgaaaaggtcatgattacagacgaagaggaaatcaggacaaccaatcccgtggctacggagcagtatggttctgtatctaccaacctccagagaggcaacagacaagcagctaccgcagatgtcaacacacaaggcgttcttccaggcatggtctggcaggacagagatgtgtaccttcaggggcccatctgggcaaagattccacacacggacggacattttcacccgtctccgctgatgggcggctttggcctgaaacatcctccgcctcagatcctgatcaagaacacgcctgtacctgcggatcctccgaccaccttcaaccagtcaaagctgaactctttcatcactcagtattctactggccaagtcagcgtggagatcgagtgggagctgcagaaggaaaacagcaagcgctggaaccccgagatccagtacacctccaactactacaaatctacaagtgtggactttgctgttaatacagaaggcgtgtactctgaaccccgccccattggcacccgttacctcacccgtaatctgtaa

SEQ ID NO: 393 - protein, 735 aa, Artificial Sequence
  Description of Artificial Sequence: Synthetic polypeptide
MAADGYLPDWLEDNLSEGIREWWDLKPGAPKPKANQQKQDDGRGLVLPGYKYLGPFNGLDKGEPVNAADAAALEHDKAYDQQLKAGDNPYLRYNHADAEFQERLQEDTSFGGNLGRAVFQAKKRVLEPLGLVEEGAKTAPGKKRPVEQSPQEPDSSSGIGKTGQQPAKKRLNFGQTGDSESVPDPQPLGEPPATPAAVGPTTMASGGGAPMADNNEGADGVGNASGNWHCDSTWLGDRVITTSTRTWALPTYNNHLYKQISSQSGASNDNHYFGYSTPWGYFDFNRFHCHFSPRDWQRLINNNWGFRPKRLSFKLFNIQVKEVTQNEGTKTIANNLTSTVQVFTDSEYQLPYVLGSAHQGCLPPFPADVFMVPQYGYLTLNNGSQAVGRSSFYCLEYFPSQMLRTGNNFTFSYTFEDVPFHSSYAHSQSLDRLMNPLIDQYLYYLSRTNTPSGTTTQSRLQFSQAGASDIRDQSRNWLPGPCYRQQRVSKTSADNNNSEYSWTGATKYHLNGRDSLVNPGPAMASHKDYEEKFFPQSGVLIFGKQGSEKTNVDIEKVMITDEEEIRTTNPVATEQYGSVSTNLQRGNRQAATADVNTQGVLPGMVWQDRDVYLQGPIWAKIPHTDGHFHPSPLMGGFGLKHPPPQILIKNTPVPADPPTTFNQSKLNSFITQYSTGQVSVEIEWELQKENSKRWNPEIQYTSNYYKSTSVDFAVNTEGVYSEPRPIGTRYLTRNL

SEQ ID NO: 394 - DNA, 2214 bp, Artificial Sequence
  Description of Artificial Sequence: Synthetic polynucleotide
atggctgccgatggttatcttccagattggctcgaggacaacctctctgagggcattcgcgagtggtgggacttgaaacctggagccccgaaacccaaagccaaccagcaaaagcaggacgacggccggggtctggtgcttcctggctacaagtacctcggacccttcaacggactcgacaagggggagcccgtcaacgcggcggatgcagcggccctcgagcacgacaaggcctacgaccagcagctcaaagcgggtgacaatccgtacctgcggtataaccacgccgacgccgagtttcaggagcgtctgcaagaagatacgtcttttgggggcaacctcgggcgagcagtcttccaggccaagaagagggttctcgaaccttttggtctggttgaggaaggtgctaagacggctcctggaaagaaacgtccggtagagcagtcgccacaagagccagactcctcctcgggcattggcaagacaggccagcagcctgcaagaaaaagattgaattttggtcagactggagacgcagactcagtacctgacccccagcctctcggacagccaccagcagccccctctggtctgggaactaatacgatggctacaggcagtggcgcaccaatggcagacaataacgagggcgccgacggagtgggtaattcctcgggaaattggcattgcgattcccaatggctgggggacagagtcatcaccaccagcacccgaacctgggccctgcccacctacaacaatcacctctacaagcaaatctccaacagcacatctggaggatcttcaaatgacaacgcctacttcggctacagcaccccctgggggtattttgatttcaacagattccactgccatttctcaccacgtgactggcagcgactcatcaacaacaattggggattccggcccaagagactcaacttcaagctcttcaacatccaggtcaaggaggtcacgcagaatgaaggcaccaagaccatcgccaataacctcaccagcaccatccaggtgtttacggactcggagtaccagctgccgtacgttctcggctctgcccaccagggctgcctgcctccgttcccggcggacgtgttcatgattccccagtacggctacctaacactcaacaacggtagtcaggccgtgggacgctcctccttctactgcctggaatactttccttcgcagatgctgagaaccggcaacaacttccagtttacttacaccttcgaggacgtgcctttccacagcagctacgcccacagccagagcttggaccggctgatgaatcctctgattgaccagtacctgtactacttgtctcggactcaaacaacaggaggcacgacaaatacgcagactctgggcttcagccaaggtgggcctaatacaatggccaatcaggcaaagaactggctgccaggaccctgttaccgccagcagcgagtatcaaagacatttgcggataacaacaacagtgaatactcgtggactggagctaccaagtaccacctcaatggcagagactctctggtgaatccgggcccggccatggcaagccacaaggacgatgaagaaaagttttttcctcagagcggggttctcatctttgggaagcaaggctcagagaaaacaaatgtggacattgaaaaggtcatgattacagacgaagaggaaatcaggacaaccaatcccgtggctacggagcagtatggttctgtatctaccaacctccagagaggcaacagacaagcagctaccgcagatgtcaacacacaaggcgttcttccaggcatggtctggcaggacagagatgtgtaccttcaggggcccatctgggcaaagattccacacacggacggacattttcacccctctcccctcatgggtggattcggacttaaacaccctccgcctcagatcctgatcaagaacacgcctgtacccgcggatcctccgaccaccttcaaccagtcaaagctgaactctttcatcacccagtattctactggccaagtcagcgtggagatcgagtgggagctgcagaaggaaaacagcaagcgctggaaccccgagatccagtacacctccaactactacaaatctacaagtgtggactttgctgttaatacagaaggcgtgtactctgaaccccgccccattggcacccgttacctcacccgtaatctgtaa

SEQ ID NO: 395 - protein, 737 aa, Artificial Sequence
  Description of Artificial Sequence: Synthetic polypeptide
MAADGYLPDWLEDNLSEGIREWWDLKPGAPKPKANQQKQDDGRGLVLPGYKYLGPFNGLDKGEPVNAADAAALEHDKAYDQQLKAGDNPYLRYNHADAEFQERLQEDTSFGGNLGRAVFQAKKRVLEPFGLVEEGAKTAPGKKRPVEQSPQEPDSSSGIGKTGQQPARKRLNFGQTGDADSVPDPQPLGQPPAAPSGLGTNTMATGSGAPMADNNEGADGVGNSSGNWHCDSQWLGDRVITTSTRTWALPTYNNHLYKQISNSTSGGSSNDNAYFGYSTPWGYFDFNRFHCHFSPRDWQRLINNNWGFRPKRLNFKLFNIQVKEVTQNEGTKTIANNLTSTIQVFTDSEYQLPYVLGSAHQGCLPPFPADVFMIPQYGYLTLNNGSQAVGRSSFYCLEYFPSQMLRTGNNFQFTYTFEDVPFHSSYAHSQSLDRLMNPLIDQYLYYLSRTQTTGGTTNTQTLGFSQGGPNTMANQAKNWLPGPCYRQQRVSKTFADNNNSEYSWTGATKYHLNGRDSLVNPGPAMASHKDDEEKFFPQSGVLIFGKQGSEKTNVDIEKVMITDEEEIRTTNPVATEQYGSVSTNLQRGNRQAATADVNTQGVLPGMVWQDRDVYLQGPIWAKIPHTDGHFHPSPLMGGFGLKHPPPQILIKNTPVPADPPTTFNQSKLNSFITQYSTGQVSVEIEWELQKENSKRWNPEIQYTSNYYKSTSVDFAVNTEGVYSEPRPIGTRYLTRNL

SEQ ID NO: 396 - DNA, 2217 bp, Artificial Sequence
  Description of Artificial Sequence: Synthetic polynucleotide
atggctgccgatggttatcttccagattggctcgaggacactctctctgaaggaataagacagtggtgggcgctgaaacctggagccccgaagcccaaagccaaccagcaaaagcaggacgacggccggggtctggtgcttcctggctacaagtacctcggacccttcaacggactcgacaagggggagcccgtcaacgcggcggatgcagcggccctcgagcacgacaaggcctacgaccagcagctcaaagcgggtgacaatccgtacctgcggtataaccacgccgacgccgagtttcaggagcgtctgcaagaagatacgtcttttgggggcaacctcgggcgagcagtcttccaggccaagaagcgggttctcgaacctctcggtctggttgaggaaggcgctaagacggctcctggaaagaagagaccggtagagccatcaccccagcgttctccagactcctctacgggcatcggcaagaaaggccaacagcccgccagaaaaagactcaattttggtcagactggcgactcagagtcagttccagaccctcaacctctcggagaaccaccagcagcccccacaagtttgggatctaatacaatggcttcaggcggtggcgcaccaatggcagacaataacgagggtgccgatggagtgggtaattcctcaggaaattggcattgcgattcccaatggctgggcgacagagtcatcaccaccagcacccgcacctgggccttgcccacctacaataaccacctctacaagcaaatctccagtgcttcaacgggggccagcaacgacaaccactacttcggctacagcaccccctgggggtattttgactttaaccgcttccactgccacttctcgccaagagactggcaaagactcatcaacaacaattggggattccggcccaagagactcaacttcaaactcttcaacatccaagtcaaggaggtcacgacgaatgatggcgtcacgaccatcgccaataacctcaccagcaccatccaggtgtttacggactcggagtaccagctgccgtacgttctcggctctgcccaccagggctgcctgcctccgttcccggcggacgtgttcatgattccccagtatggatacctcaccctgaacaacggaagtcaagcggtgggacgctcatccttttactgcctggagtacttcccttcgcagatgctaaggactggaaataacttccaattcagctataccttcgaggatgtaccttttcacagcagctacgctcacagccagagtttggatcgcttgatgaatcctcttattgatcagtatctgtactacctgaacagaacgcaaggaacaacctctggaacaaccaaccaatcacggctgctttttagccaggctgggcctcagtctatgtctttgcaggccagaaattggctacctgggccctgctaccggcaacagagactttcaaagactgctaacgacaacaacaacagtaactttccttggacagcagccagcaaatatcatctcaatggccgcgactcgctggtgaatccaggaccagctatggccagtcacaaggacgatgaagaaaaatttttccctatgcacggcaatctaatatttggcaaagaagggacaacggcaagtaacgcagaattagataatgtaatgattacggatgaagaagagattcgtaccaccaatcctgtggcaacagagcagtatggaactgtggcaaataacttgcagagctcaaatacagctcccacgactagaactgtcaatgatcagggggccttacctggcatggtgtggcaagatcgtgacgtgtaccttcaggggcccatctgggcaaagattccacacacggacggacattttcacccctctcccctcatgggtggattcggacttaaacaccctcctccgcagattctcatcaagaacaccccggtacctgcgaatccttcgaccaccttcagtgcggcaaagtttgcttccttcatcacacagtactccacgggacaggtcagcgtggagatcgagtgggagctgcagaaggaaaacagcaagcgctggaacccggagatccagtacacttccaactattacaagtctaataatgttgaatttgctgttaatactgaaggtgtatatagtgaaccccgccccattggcaccagatacctgactcgtaatctgtaa

SEQ ID NO: 397 - protein, 738 aa, Artificial Sequence
  Description of Artificial Sequence: Synthetic polypeptide
MAADGYLPDWLEDTLSEGIRQWWALKPGAPKPKANQQKQDDGRGLVLPGYKYLGPFNGLDKGEPVNAADAAALEHDKAYDQQLKAGDNPYLRYNHADAEFQERLQEDTSFGGNLGRAVFQAKKRVLEPLGLVEEGAKTAPGKKRPVEPSPQRSPDSSTGIGKKGQQPARKRLNFGQTGDSESVPDPQPLGEPPAAPTSLGSNTMASGGGAPMADNNEGADGVGNSSGNWHCDSQWLGDRVITTSTRTWALPTYNNHLYKQISSASTGASNDNHYFGYSTPWGYFDFNRFHCHFSPRDWQRLINNNWGFRPKRLNFKLFNIQVKEVTTNDGVTTIANNLTSTIQVFTDSEYQLPYVLGSAHQGCLPPFPADVFMIPQYGYLTLNNGSQAVGRSSFYCLEYFPSQMLRTGNNFQFSYTFEDVPFHSSYAHSQSLDRLMNPLIDQYLYYLNRTQGTTSGTTNQSRLLFSQAGPQSMSLQARNWLPGPCYRQQRLSKTANDNNNSNFPWTAASKYHLNGRDSLVNPGPAMASHKDDEEKFFPMHGNLIFGKEGTTASNAELDNVMITDEEEIRTTNPVATEQYGTVANNLQSSNTAPTTRTVNDQGALPGMVWQDRDVYLQGPIWAKIPHTDGHFHPSPLMGGFGLKHPPPQILIKNTPVPANPSTTFSAAKFASFITQYSTGQVSVEIEWELQKENSKRWNPEIQYTSNYYKSNNVEFAVNTEGVYSEPRPIGTRYLTRNL

SEQ ID NO: 398 - DNA, 2208 bp, Artificial Sequence; identical to SEQ ID NO: 34
  Description of Artificial Sequence: Synthetic polynucleotide

SEQ ID NO: 399 - protein, 735 aa, Artificial Sequence [sequence omitted]

SEQ ID NO: 400 - DNA, 2208 bp, Artificial Sequence
  Description of Artificial Sequence: Synthetic polynucleotide
atggctgccgatggttatcttccagattggctcgaggacaacctctctgagggcattcgcgagtggtgggcgctgaaacctggagccccgaagcccaaagccaaccagcaaaagcaggacgacggccggggtctggtgcttcctggctacaagtacctcggacccttcaacggactcgacaagggggagcccgtcaacgcggcggacgccgcggccctcgagcacgacaaggcctacgaccagcagctgcaggcgggtgacaatccgtacctgcggtataaccacgccgacgccgagtttcaggagcgtctgcaagaagatacgtcttttgggggcaacctcgggcgagcagtcttccaggccaaaaagaggcttcttgaacctcttggtctggttgaggaagcagctaaaacggctcctggaaagaagaggcctgtagagcagtctcctcaggaaccggactcctccgcgggtattggcaaatcgggtgcacagcccgccaaaaagagactcaatttcggtcagactggcgactcagagtcagtcccagaccctcaacctctcggagaaccaccagcagcccccacaagtttgggatctaatacaatggcttcaggcggtggcgcaccaatggcagacaataacgaaggcgccgacggagtgggtaatgcctcaggaaattggcattgcgattccacatggctgggcgacagagtcatcaccaccagcacccgcacctgggccttgcccacctacagcaaccatctctacaagcaaatctccagccaatcaggagcttcaaacgacaacgactactttggctacagcaccccttgggggtattttgatttcaacagattccactgccacttttcaccacgtgactggcaaagactcatcaacaacaactggggattccgacccaagagactcaacttcaagctctttaacattcaagtcaaagaggtcacgcagaatgacggtacgacgacgattgccaataaccttaccagcacggttcaggtgtttactgactcggagtaccagctcccgtacgtcctcggctcggcgcatcaaggatgcctcccgccgttcccagcagacgtcttcatggtgccacagtatggatacctcaccctgaacaacgggagtcaggcagtaggacgctcttcattttactgcctggagtactttccttctcagatgctgcgtaccggaaacaactttaccttcagctacacttttgaggacgttcctttccacagcagctacgctcacagccagagtctggaccgtctcatgaatcctctcatcgaccagtacctgtattacttgagcagaacaaacactccaagtggaaccaccacgcagtcaaggcttcagttttctcaggccggagcgagtgacattcgggaccagtctaggaactggcttcctggaccctgttaccgccagcagcgagtatcaaagacatctgaggataacaacaacagtgaatactcgtggactggagctaccaagtaccacctcaatggcagagactctctggtgaatccgggcccggccatggcaagccacaaggacgatgaagaaaagttttttcctcagagcggggttctcatctttgggaagcaaggctcagagaaaacaaatgtggacattgaaaaggtcatgattacagacgaagaggaaatcaggacaaccaatcccgtggctacggagcagtatggttctgtatctaccaacctccagagaggcaacagacaagcagctaccgcagatgtcaacacacaaggcgttcttccaggcatggtctggcaggacagagatgtgtaccttcaggggcccatctgggcaaagattccacacacggacggacattttcacccctctcccctcatgggtggattcggacttaaacaccctcctccacagattctcatcaagaacaccccggtacctgcgaatccttcgaccaccttcagtgcggcaaagtttgcttccttcatcacacagtactccacgggacaggtcagcgtggagatcgagtgggagctgcagaaggaaaacagcaaacgctggaatcccgaaattcagtacacttccaactacaacaagtctgttaatgtggactttactgtggacactaatggcgtgtattcagagcctcgccccattggcaccagatacctgactcgtaatctgtaa

SEQ ID NO: 401 - protein, 735 aa, Artificial Sequence
  Description of Artificial Sequence: Synthetic polypeptide
MAADGYLPDWLEDNLSEGIREWWALKPGAPKPKANQQKQDDGRGLVLPGYKYLGPFNGLDKGEPVNAADAAALEHDKAYDQQLQAGDNPYLRYNHADAEFQERLQEDTSFGGNLGRAVFQAKKRLLEPLGLVEEAAKTAPGKKRPVEQSPQEPDSSAGIGKSGAQPAKKRLNFGQTGDSESVPDPQPLGEPPAAPTSLGSNTMASGGGAPMADNNEGADGVGNASGNWHCDSTWLGDRVITTSTRTWALPTYSNHLYKQISSQSGASNDNDYFGYSTPWGYFDFNRFHCHFSPRDWQRLINNNWGFRPKRLNFKLFNIQVKEVTQNDGTTTIANNLTSTVQVFTDSEYQLPYVLGSAHQGCLPPFPADVFMVPQYGYLTLNNGSQAVGRSSFYCLEYFPSQMLRTGNNFTFSYTFEDVPFHSSYAHSQSLDRLMNPLIDQYLYYLSRTNTPSGTTTQSRLQFSQAGASDIRDQSRNWLPGPCYRQQRVSKTSEDNNNSEYSWTGATKYHLNGRDSLVNPGPAMASHKDDEEKFFPQSGVLIFGKQGSEKTNVDIEKVMITDEEEIRTTNPVATEQYGSVSTNLQRGNRQAATADVNTQGVLPGMVWQDRDVYLQGPIWAKIPHTDGHFHPSPLMGGFGLKHPPPQILIKNTPVPANPSTTFSAAKFASFITQYSTGQVSVEIEWELQKENSKRWNPEIQYTSNYNKSVNVDFTVDTNGVYSEPRPIGTRYLTRNL

SEQ ID NO: 402 - DNA, 2208 bp, Artificial Sequence
  Description of Artificial Sequence: Synthetic polynucleotide
atggctgccgatggttatcttccagattggctcgaggacaacctctctgagggcattcgcgagtggtgggcgctgaaacctggagccccgaagcccaaagccaaccagcaaaagcaggacgacggccggggtctggtgcttcctggctacaagtacctcggacccttcaacggactcgacaagggggagcccgtcaacgcggcggacgcagcggccctcgagcacgacaaggcctacgaccagcagctgcaggcgggtgacaatccgtacctgcggtataaccacgccgacgccgagttccaggagcgtctgcaagaagatacgtcttttgggggcaacctcgggcgagcagtcttccaggccaagaagagggttctcgaaccttttggtctggttgaggaaggtgctaagacggctcctggaaagaaacgtccggtagagcagtcgccacaagagccagactcctcctcgggcattggcaagacaggccagcagcccgctaaaaagagactcaattttggtcagactggcgactcagagtcagtcccagaccctcaacctctcggagaaccaccagcagcccccacaagtttgggatctaatacaatggcttcaggcggtggcgcaccaatggcagacaataacgagggcgccgacggagtgggtaattcctcgggaaattggcattgcgattccacatggatgggcgacagagtcatcaccaccagcacccgaacctgggccctgcccacctacaacaaccacctctacaaacaaatttccagccaatcaggagcttcaaacgacaaccactactttggctacagcaccccttgggggtattttgactttaacagattccactgccacttttcaccacgtgactggcagcgactcattaacaacaactggggattccggcccaagaaactcaacttcaagctctttaacatccaggtcaaggaggtcacgcagaatgaaggcaccaagaccatcgccaataacctcaccagcaccatccaggtgtttacggactcggagtaccagctgccgtacgttctcggctctgcccaccagggctgcctgcctccgttcccggcggacgtgttcatgattccccagtacggctacctaacactcaacaacggtagtcaggccgtgggacgctcctccttctactgcctggaatactttccttcgcagatgctgagaaccggcaacaacttccagtttacttacaccttcgaggacgtgcctttccacagcagctacgcccacagccagagcttggaccggctgatgaatcctctgattgaccagtacctgtattacttgtctcggactcaaacaacaggaggcacgacaaatacgcagactctgggcttcagccaaggtgggcctaatacaatggccaatcaggcaaagaactggctgcctggaccctgttaccgccagcagcgagtatcaaagacatctgcggataacaacaacagtgaatactcgtggactggagctaccaagtaccacctcaatggcagagactctctggtgaatccgggcccggccatggcaagccacaaggacgatgaagaaaagttttttcctcagagcggggttctcatctttgggaagcaaggctcagagaaaacaaatgtggacattgaaaaggttatgattacagacgaagaggaaatcaggacaaccaatcccgtggctacggagcagtatggttctgtatctaccaacctccagagaggcaacagacaagcagctaccgcagatgtcaacacacagggcgttcttccaggcatggtctggcaggacagagatgtgtaccttcagggtcccatttgggccaaaattcctcacacagatggacactttcacccgtcccctcttatgggcggctttggactcaagaacccgcctcctcagatcctcatcaaaaacacgcctgttcctgcgaatcctccggcagagttttcagctacaaagtttgcttcattcatcacccaatactccacaggacaagtgagtgtggaaattgaatgggagctgcagaaagaaaacagcaagcgctggaatcccgaagtgcagtacacatccaattatgcaaaatctgccaacgttgattttactgtggacactaatggcgtgtattcagagcctcgccccattggcaccagatacctcacccgtaatctgtaa

SEQ ID NO: 403 - protein, 735 aa, Artificial Sequence
  Description of Artificial Sequence: Synthetic polypeptide
MAADGYLPDWLEDNLSEGIREWWALKPGAPKPKANQQKQDDGRGLVLPGYKYLGPFNGLDKGEPVNAADAAALEHDKAYDQQLQAGDNPYLRYNHADAEFQERLQEDTSFGGNLGRAVFQAKKRVLEPFGLVEEGAKTAPGKKRPVEQSPQEPDSSSGIGKTGQQPAKKRLNFGQTGDSESVPDPQPLGEPPAAPTSLGSNTMASGGGAPMADNNEGADGVGNSSGNWHCDSTWMGDRVITTSTRTWALPTYNNHLYKQISSQSGASNDNHYFGYSTPWGYFDFNRFHCHFSPRDWQRLINNNWGFRPKKLNFKLFNIQVKEVTQNEGTKTIANNLTSTIQVFTDSEYQLPYVLGSAHQGCLPPFPADVFMIPQYGYLTLNNGSQAVGRSSFYCLEYFPSQMLRTGNNFQFTYTFEDVPFHSSYAHSQSLDRLMNPLIDQYLYYLSRTQTTGGTTNTQTLGFSQGGPNTMANQAKNWLPGPCYRQQRVSKTSADNNNSEYSWTGATKYHLNGRDSLVNPGPAMASHKDDEEKFFPQSGVLIFGKQGSEKTNVDIEKVMITDEEEIRTTNPVATEQYGSVSTNLQRGNRQAATADVNTQGVLPGMVWQDRDVYLQGPIWAKIPHTDGHFHPSPLMGGFGLKNPPPQILIKNTPVPANPPAEFSATKFASFITQYSTGQVSVEIEWELQKENSKRWNPEVQYTSNYAKSANVDFTVDTNGVYSEPRPIGTRYLTRNL

SEQ ID NO: 404 - DNA, 2214 bp, Artificial Sequence; identical to SEQ ID NO: 394
  Description of Artificial Sequence: Synthetic polynucleotide

SEQ ID NO: 405 - protein, 737 aa, Artificial Sequence; identical to SEQ ID NO: 395
  Description of Artificial Sequence: Synthetic polypeptide

SEQ ID NO: 406 - DNA, 2196 bp, Adeno-associated virus
atggctgctgacggttatcttccagattggctcgaggacaacctctctgagggcattcgcgagtggtgggcgctgaaacctggagccccgcaacccaaagccaaccagcaaaagcaggacgacggccggggtctggtgcttcctggctacaagtacctcggacccttcaacggactcgacaagggggagcccgtcaacgaggcggacgccgcggccctcgagcacgacaaggcctacgaccagcagctcaaagcgggtgacaatccgtacctgcggtataatcacgccgacgccgagtttcaagagcgtctgcaagaagatacgtcctttgggggcaacctcgggcgagcagtcttccaggccaaaaagagggtactcgagcctctgggtctggttgaggaaggcgctaagacggctcctggaaagaagcggccagtagaaccggactccagctcgggcatcggcaagtcaggccagcagcccgcgaaaaagagactgaattttgggcagactggcgactcagagtcagtgcctgacccccaacctctctcagaaccacccgcaggtccctctggtctgggatctggtacaatggctgctggcggtggcgctccaatggcagacaataacgaaggcgccgacggagtgggtaatgtctcaggaaattggcattgcgattccacatggctgggcgaccgagtcatcaccaccagcactcggacctgggccctccccacctacaacaaccacctctacaagcaaatctccaacgggacctcgggaggcagcagcaacgacaacacctactttggctacagcaccccctgggggtattttgactttaacagattccactgccacttttcaccacgtgactggcagcgactcatcaacaacaactgggggttccggcccaagaagctcaacttcaagctcttcaacatccaggtcaaggaggtcacccagaatgaaggcaccaagaccatcgccaataacctcaccagcacggtgcaggtctttacggactcggagtaccagctcccgtacgtgctcggctctgcccaccagggctgcctgcctccgttcccggcggacgtgttcatgattccgcagtacgggtacctgacgctgaacaacgggagccaggccgtggggcgatcctccttctactgcctggagtactttccctcgcagatgctgagaacgggcaacaactttaccttcagctacaccttcgaggacgtgcccttccacagcagctacgcgcacagccagagcctggaccggctgatgaacccgctgattgaccagtacctgtactacctgtctcggactcagaccaacgggaccaatgccacgcagactctgttgtttgctcaggccgggcctcagaacatgtcggctcaggccaagaactggctgcctggtccttgctatcggcagcagcgcgtctctacgacagtgtcgcaaaacaacaacagcaactttacctggaccggggcgaccaagtaccacctgaacggccgagactccctggtgagccccggtgtcgccatggcaacgcacaaggacgacgaggagcgcttcttcccgagcagcggggtcctgatgtttggcaagcagggcgctggaaaggacaatgtcgagtacaccaacgtgatgctcaccagcgaggaggagatcaagaccaccaaccctgtggccacggagcagtacggcgtggtggctgacaatctgcagcagaccaactcagctcccattgtgggggcagtcaacagccagggggccttacccggtatggtctggcagaaccgggacgtgtacctgcagggtcccatctgggccaagatcccgcatacggacggcaactttcacccgtctcctctcatgggcggctttggactgaaacacccgcctccccagatcctgatcaaaaacacgccggtacctgcggatcccccggtgaactttacggacgctaagctggcgagtttcatcacgcagtacagcaccgggcaggtcagcgtggagattgagtgggagctgcagaaggagaacagcaagcgctggaatcccgagattcagtacacttccaattattataaatcagctaatgtggactttgccgtcaatgcagatggtgtatatagtgaaccccgccccattggcactcgttacctcacccgtaatctgtaa

SEQ ID NO: 407 - protein, 731 aa, Adeno-associated virus
MAADGYLPDWLEDNLSEGIREWWALKPGAPQPKANQQKQDDGRGLVLPGYKYLGPFNGLDKGEPVNEADAAALEHDKAYDQQLKAGDNPYLRYNHADAEFQERLQEDTSFGGNLGRAVFQAKKRVLEPLGLVEEGAKTAPGKKRPVEPDSSSGIGKSGQQPAKKRLNFGQTGDSESVPDPQPLSEPPAGPSGLGSGTMAAGGGAPMADNNEGADGVGNVSGNWHCDSTWLGDRVITTSTRTWALPTYNNHLYKQISNGTSGGSSNDNTYFGYSTPWGYFDFNRFHCHFSPRDWQRLINNNWGFRPKKLNFKLFNIQVKEVTQNEGTKTIANNLTSTVQVFTDSEYQLPYVLGSAHQGCLPPFPADVFMIPQYGYLTLNNGSQAVGRSSFYCLEYFPSQMLRTGNNFTFSYTFEDVPFHSSYAHSQSLDRLMNPLIDQYLYYLSRTQTNGTNATQTLLFAQAGPQNMSAQAKNWLPGPCYRQQRVSTTVSQNNNSNFTWTGATKYHLNGRDSLVSPGVAMATHKDDEERFFPSSGVLMFGKQGAGKDNVEYTNVMLTSEEEIKTTNPVATEQYGVVADNLQQTNSAPIVGAVNSQGALPGMVWQNRDVYLQGPIWAKIPHTDGNFHPSPLMGGFGLKHPPPQILIKNTPVPADPPVNFTDAKLASFITQYSTGQVSVEIEWELQKENSKRWNPEIQYTSNYYKSANVDFAVNADGVYSEPRPIGTRYLTRNL

SEQ ID NO: 408 - DNA, 2196 bp, Adeno-associated virus
atggctgctgacggttatcttccagattggctcgaggacaacctctctgagggcattcgcgagtggtgggcgctgaaacctggagccccgcaacccaaagccaaccagcaaaagcaggacgacggccggggtctggtgcttcctggctacaagtacctcggacccttcaacggactcgacaagggggagcccgtcaacgaggcggacgccgcggccctcgagcacgacaaggcctacgaccagcagctcaaagcgggtgacaatccgtacctgcggtataatcacgccgacgccgagtttcaagagcgtctgcaagaagatacgtcctttgggggcaacctcgggcgagcagtcttccaggccaaaaagagggtactcgagcctctgggtctggttgaggaaggcgctaagacggctcctggaaagaagcggccagtagaaccggactccagctcgggcatcggcaagtcaggccggcagcccgcgaaaaagagactgaattttgggcagactggcgactcagagtcagtgcctgacccccaacctctctcagaaccacccgcaggtccctctggtctgggatctggtacaatggctgcaggcggtggcgctccaatggcagacaataacgaaggcgccgacggagtgggtaatgcctcaggaaattggcattgcgattccacatggctgggcgaccgagtcatcaccaccagcactcggacctgggccctccccacctacaacaaccacctctacaagcaaatctccaacgggacctcgggaggcagcagcaacgacaacacctactttggctacagcaccccctgggggtattttgactttaacagattccactgccacttttcaccacgtgactggcagcgactcatcaacaacaactggggattccggcccaagaggctcaacttcaagctcttcaacatccaggtcaaggaggtcacccagaatgaaggcaccaagaccatcgccaataacctcaccagcacggtgcaggtctttacggactcgaagtaccagctcccgtacgtgctcggctctgcccaccagggctgcctgcctccgttcccggcggacgtgttcatgattccgcagtacgggtacctgacgctgaacaacgggagccaggccgtggggcgatcctccttctactgcctggagtactttccctcgcagatgctgagaacgggcaacaactttaccttcagctacaccttcgaggacgtgcccttccacagcagctacgcgcacagccagagcctggaccggctgatgaacccgctgattgaccagtacctgtactacctgtctcggactcagaccaacgggaccaatgccacgcagactctgttgtttgctcaggccgggcctcagaacatgtcggctcaggccaagaactggctgcctggtccttgctatcggcagcagcgcgtctctacgacagtgtcgcaaaacaacaacagcaactttacctggaccggggcgaccaagtaccacctgaacggccgagactccctggtgaaccccggtgtcgccatggcaacgcacaaggacgacgaggagcgcttcttcccgagcagcggggtcctgatgtttggcaagcagggcgctggaaaggacaatgtcgagtacaccaacgtgatgctcaccagcgaggaggagatcaagaccaccaaccctgtggccacggagcagtacggtgtggtggctgacaatctgcagcagaccaactcggctcccattgtgggggcagtcaacagccagggggccttacccggtatggtctggcagaaccgggacgtgtacctgcagggtcccatctgggccaagatcccgcatacggacggcaactttcacccgtctcctctcatgggcggctttggactgaaacacccgcctccccagatcctgatcaaaaacacgccggtacctgcggatcccccggtgaactttacggacgctaagctggcgagtttcatcacgcagtacagcaccgggcaggtcagcgtggagattgagtgggagctgcagaaggagaacagcaagcgctggaatcccgagattcagtacacttccaattattataaatcagctaatgtggactttgccgtcaatgcagatggtgtatatagtgaaccccgccccattggcactcgttacctcacccgtaatctgtaa

SEQ ID NO: 409 - protein, 731 aa, Adeno-associated virus
MAADGYLPDWLEDNLSEGIREWWALKPGAPQPKANQQKQDDGRGLVLPGYKYLGPFNGLDKGEPVNEADAAALEHDKAYDQQLKAGDNPYLRYNHADAEFQERLQEDTSFGGNLGRAVFQAKKRVLEPLGLVEEGAKTAPGKKRPVEPDSSSGIGKSGRQPAKKRLNFGQTGDSESVPDPQPLSEPPAGPSGLGSGTMAAGGGAPMADNNEGADGVGNASGNWHCDSTWLGDRVITTSTRTWALPTYNNHLYKQISNGTSGGSSNDNTYFGYSTPWGYFDFNRFHCHFSPRDWQRLINNNWGFRPKRLNFKLFNIQVKEVTQNEGTKTIANNLTSTVQVFTDSKYQLPYVLGSAHQGCLPPFPADVFMIPQYGYLTLNNGSQAVGRSSFYCLEYFPSQMLRTGNNFTFSYTFEDVPFHSSYAHSQSLDRLMNPLIDQYLYYLSRTQTNGTNATQTLLFAQAGPQNMSAQAKNWLPGPCYRQQRVSTTVSQNNNSNFTWTGATKYHLNGRDSLVNPGVAMATHKDDEERFFPSSGVLMFGKQGAGKDNVEYTNVMLTSEEEIKTTNPVATEQYGVVADNLQQTNSAPIVGAVNSQGALPGMVWQNRDVYLQGPIWAKIPHTDGNFHPSPLMGGFGLKHPPPQILIKNTPVPADPPVNFTDAKLASFITQYSTGQVSVEIEWELQKENSKRWNPEIQYTSNYYKSANVDFAVNADGVYSEPRPIGTRYLTRNL

SEQ ID NO: 410 - DNA, 2196 bp, Adeno-associated virus
atggctgctgacggttatcttccagattggctcgaggacaacctctctgagggcattcgcgagtggtgggcgctgaaacctggagccccgcaacccaaagccaaccagcaaaagcaggacgacggccggggtctggtgcttcctggctacaagtacctcggacccttcaacggactcgacaagggggagcccgtcaacgaggcggacgccgcggccctcgagcacgacaaggcctacgaccagcagctcaaagcgggtgacaatccgtacctgcggtataatcacgccgacgccgagtttcaagagcgtctgcaagaagatacgtcctttgggggcaacctcgggcgagcagtcttccaggccaaaaagagggtactcgagcctctgggtctggttgaggaaggcgctaagacggctcctggaaagaagcggccagtagaaccggactccagctcgggcatcggcaagtcaggccagcagcccgcgaaaaagagactgaattttgggccgactggcgactcagagtcagtgcctgacccccaacctctctcagaaccacctgcaggtccctctggtctgggatctggtacaatggctgcaggcggtggcgctccaatggcagacaataacgaaggcgccgacggagtgggtaatgtctcaggaaattggcattgcgattccacatggctgggcgaccgagtcatcaccaccagcactcggacctgggccctccccacctacaacaaccacctctacaagcaaatctccaacgggacctcgggaggcagcagcaacgacaacacctactttggctacagcaccccctgggggtattttgactttaacagattccactgccacttttcaccacgcgactggcagcgactcatcaacaacaactggggattccggcccaagaagctcaacttcaagctcttcaacatccaggtcaaggaggtcacccagaatgaaggcaccaagaccaccgccaataacctcaccagcacggtgcaggtctttacggactcggagtaccagctcccgtacgtgctcggctctgcccaccagggctgcctgcctccgttcccggcggacgtgttcatgattccgcagtacgggtacctgacgctgaacaacgggagccaggccgtggggcgatcctccttctactgcctggagtactttccctcgcagatgctgagaacgggcaacaactttaccttcagctacaccttcgaggacgtgcccttccacagcagctacgcgcacagccagagcctggaccggctgatgaacccgctgattgaccagtacctgtactacctgtctcggactcagaccaacgggaccaatgccacgcagactctgttgtttgctcaggccgggcctcagaacatgtcggctcaggccaagaactggctgcctggtccttgctatcggcagcagcgcgtctctacggcagtgtcgcaaaacaacaacagcaactttacctggaccggggcgaccaagtaccacctgaacggccgagactccctggtgaaccccggtgtcgccatggcaacgcacaaggacgacgaggagcgcttcttcccgagcagcggggtcctgatgtttggcaagcagggcgctggaaaggacaatgtcgagtacaccaacgtgatgctcaccagcgaggaggagatcaagaccaccaaccctgtggccacggagcagtacggtgtggtggctgacaatctgcagcagaccaactcggctcccattgtgggggcagtcaacagccagggggccttacccggtatggtctggcagaaccgggacgtgtacctgcagggtcccatctgggccaagatcccgcatacggacggcaactttcacccgtctcctctcatgggcggctttggactgaaacacccgcctccccagatcctgatcaaaaacacgccggtacctgcggatcccccggtgaactttacggacgctaagctggcgagtttcatcacgcagtacagcaccgggcaggtcagcgtggagattgagtgggagctgcagaaggagaacagcaagcgctggaatcccgagattcagtacacttccaattattataaatcagctaatgtggactttgccgtcaatgcagatggtgtatatagcgaaccccgccccattggcactcgttacctcacccgtaatctgtaa

SEQ ID NO: 411 - protein, 731 aa, Adeno-associated virus
MAADGYLPDWLEDNLSEGIREWWALKPGAPQPKANQQKQDDGRGLVLPGYKYLGPFNGLDKGEPVNEADAAALEHDKAYDQQLKAGDNPYLRYNHADAEFQERLQEDTSFGGNLGRAVFQAKKRVLEPLGLVEEGAKTAPGKKRPVEPDSSSGIGKSGQQPAKKRLNFGPTGDSESVPDPQPLSEPPAGPSGLGSGTMAAGGGAPMADNNEGADGVGNVSGNWHCDSTWLGDRVITTSTRTWALPTYNNHLYKQISNGTSGGSSNDNTYFGYSTPWGYFDFNRFHCHFSPRDWQRLINNNWGFRPKKLNFKLFNIQVKEVTQNEGTKTTANNLTSTVQVFTDSEYQLPYVLGSAHQGCLPPFPADVFMIPQYGYLTLNNGSQAVGRSSFYCLEYFPSQMLRTGNNFTFSYTFEDVPFHSSYAHSQSLDRLMNPLIDQYLYYLSRTQTNGTNATQTLLFAQAGPQNMSAQAKNWLPGPCYRQQRVSTAVSQNNNSNFTWTGATKYHLNGRDSLVNPGVAMATHKDDEERFFPSSGVLMFGKQGAGKDNVEYTNVMLTSEEEIKTTNPVATEQYGVVADNLQQTNSAPIVGAVNSQGALPGMVWQNRDVYLQGPIWAKIPHTDGNFHPSPLMGGFGLKHPPPQILIKNTPVPADPPVNFTDAKLASFITQYSTGQVSVEIEWELQKENSKRWNPEIQYTSNYYKSANVDFAVNADGVYSEPRPIGTRYLTRNL

SEQ ID NO: 412 - DNA, 4404 bp, Adeno-associated virus
atggctgccgatggttatcttccagattggctcgagggcaacctctctgagggcattcgcgagtggtgggacttgaaacctggagccccgaaacccaaagccaaccagcaaaagcaggacgacggccggggtctggtgcttcctggctacaggtacctcggacccttcaacggactcgacaagggagagccggtcaacgaggcagacgccgcggccctcgagcacgacaaggcctacgacaagcagctcgagcagggggacaacccgtacctcaagtacaaccacgccgacgccgagtttcaggagcgtcttcaagaagatacgtcttttgggggcaacctcgggcgagcagtcttccaggccaagaagcgggttctcgaacctctcggtctggttgaggaaggcgctaagacggctcctggaaagaagagacccatagaatcccccgactcctccacgggcatcggcaagaacggccagccgcccgctaaaaagaagctcaactttgggcagactggcgactcagagtcagtgcccgacccccaacctctcggagaacctcccgccgcgccctcaggtctgggatctggtacaatggctgcaggcggtggcgcaccaatggcagacaataacgaaggcgccgacggagtgggtaatgcctccggaaattggcattgcgattccacatggctgggcgacagagtcatcaccaccagcacccgcacctgggccctgcccacctacaacaaccacctctacaagcagatatcaagtcagagcggggctaccaacgacaaccacttcttcggctacagcaccccctggggctattttgacttcaacagattccactgccacttctcaccacgtgactggcagcgactcatcaacaacaactggggattccggcccagaaagctgcggttcaagttgttcaacatccaggtcaaggaggtcacgacgaacgacggcgttacgaccatcgctaataaccttaccagcacgattcaggtcttctcggactcggagtaccaactgccgtacgtcctcggctctgcgcaccagggctgcctccctccgttccctgcggacgtgttcatgattcctcagtacggatatctgactctaaacaacggcagtcagtctgtgggacgttcctccttctactgcctggagtactttccttctcagatgctgagaacgggcgataactttgaattcagctacacctttgaggaagtgcctttccacagcagctatgcgcacagccagagcctggaccggctgatgaatcccctcatcgaccagtacctgtactacctggcccggacccagagcactacggggtccacaagggagctgcagttccatcaggctgggcccaacaccatggccgagcaatcaaagaactggctgcccggaccctgttatcggcagcagagactgtcaaaaaacatagacagcaacaacaacagtaactttgcctggaccggggccactaaataccatctgaatggtagaaattcattaaccaacccgggcgtagccatggccaccaacaaggacgacgaggaccagttctttcccatcaacggagtgctggtttttggcaaaacgggggctgccaacaagacaacgctggaaaacgtgctaatgaccagcgaggaggagatcaaaaccaccaatcccgtggctacagaagaatacggtgtggtctccagcaacctgcaatcgtctacggccggaccccagacacagactgtcaacagccagggggctctgcccggcatggtctggcagaaccgggacgtgtacctgcagggtcccatctgggccaaaattcctcacacggacggcaactttcacccgtctcccctgatgggcggatttggactcaaacacccgcctcctcaaattctcatcaaaaacaccccggtacctgctaatcctccagaggtgtttactcctgccaagtttgcctcatttatcacgcagtacagcaccggccaggtcagcgtggagatcgagtgggaactgcagaaagaaaacagcaaacgctggaatccagagattcagtacacctcaaattatgccaagtctaataatgtggaatttgctgtcaacaacgaaggggtttatactgagcctcgccccattggcacccgttacctcacccgtaacctgtaaatggctgccgatggttatcttccagattggctcgaggacaacctctctgagggcattcgcgagtggtgggacttgaaacctggagccccgaaacccaaagccaaccagcaaaagcaggacgacggccggggtctggtgcttcctggctacaagtacctcggacccttcaacggactcgacaagggggagcccgtcaacgcggcggacgcagcggccctcgagcacgacaaggcctacgaccagcagctcaaagcgggtgacaatccgtacctgcggtataaccacgccgacgccgagtttcaggagcgtctgcaagaagatacgtcttttgggggcaacctcgggcgagcagtcttccaggccaagaagcgggttctcgaacctctcggtctggttgaggaaggcgctaagacggctcctggaaagaagagaccggtagagccatcaccccagcgttctccagactcctctacgggcatcggcaagaaaggccagcagcccgcgaaaaagagactcaactttgggcagactggcgactcagagtcagtgcccgaccctcaaccaatcggagaaccccccgcaggcccctctggtctgggatctggtacaatggctgcaggcggtggcgctccaatggcagacaataacgaaggcgccgacggagtgggtagttcctcaggaaattggcattgcgattccacatggctgggcgacagagtcatcaccaccagcacccgaacctgggccctccccacctacaacaaccacctctacaagcaaatctccaacgggacttcgggaggaagcaccaacgacaacacctacttcggctacagcaccccctgggggtattttgactttaacagattccactgccacttctcaccacgtgactggcagcgactcatcaacaacaactggggattccggcccaagagactcaacttcaagctcttcaacatccaggtcaaggaggtcacgcagaatgaaggcaccaagaccatcgccaataaccttaccagcacgattcaggtctttacggactcggaataccagctcccgtacgtcctcggctctgcgcaccagggctgcctgcctccgttcccggcggacgtcttcatgattcctcagtacgggtacctgactctgaacaatggcagtcaggccgtgggccgttcctccttctactgcctggagtactttccttctcaaatgctgagaacgggcaacaactttgagttcagctaccagtttgaggacgtgccttttcacagcagctacgcgcacagccaaagcctggaccggctgatgaaccccctcatcgaccagtacctgtactacctgtctcggactcagtccacgggaggtaccgcaggaactcagcagttgctattttctcaggccgggcctaataacatgtcggctcaggccaaaaactggctacccgggccctgctaccggcagcaacgcgtctccacgacactgtcgcaaaataacaacagcaactttgcctggaccggtgccaccaagtatcatctgaatggcagagactctctggtaaatcccggtgtcgctatggcaacccacaaggacgacgaagagcgattttttccgtccagcggagtcttaatgtttgggaaacagggagctggaaaagacaacgtggactatagcagcgttatgctaaccagtgaggaagaaattaaaaccaccaacccagtggccacagaacagtacggcgtggtggccgataacctgcaacagcaaaacgccgctcctattgtaggggccgtcaacagtcaaggagccttacctggcatggtctggcagaaccgggacgtgtacctgcagggtcctatctgggccaagattcctcacacggacggaaactttcatccctcgccgctgatgggaggctttggactgaaacacccgcctcctcagatcctgattaagaatacacctgttcccgcggatcctccaactaccttcagtcaagctaagctggcgtcgttcatcacgcagtacagcaccggacaggtcagcgtggaaattgaatgggagctgcagaaagaaaacagcaaacgctggaacccagagattcaatacacttccaactactacaaatctacaaatgtggactttgctgttaacacagatggcacttattctgagcctcgccccatcggcacccgttacctcacccgtaatctgtaa

SEQ ID NO: 413 - protein, 738 aa, Adeno-associated virus; identical to SEQ ID NO: 31

SEQ ID NO: 414 - DNA, 3129 bp, Adeno-associated virus
gaattcgccctttctacggctgcgtcaactggaccaatgagaactttcccttcaacgattgcgtcgacaagatggtgatctggtgggaggagggcaagatgacggccaaggtcgtggagtccgccaaggccattctcggcggcagcaaagtgcgcgtggaccaaaagtgcaagtcgtccgcccagatcgaccccacccccgtgatcgtcacctccaacaccaacatgtgcgccgtgattgacgggaacagcaccaccttcgagcaccagcagccgttgcaggaccggatgttcaagtttgaactcacccgccgtctggagcacgactttggcaaggtgacaaagcaggaagtcagagagttcttccgctgggcgcaggatcacgtgaccgaggtggcgcacgagttctacgtcagaaagggtggagccaacaagagacccgcccccgatgacgcggataaaagcgagcccaagcgggcctgcccctcagtcgcggatccatcgacgtcagacgcggaaggagctccggtggactttgccgacaggtaccaaaacaaatgttctcgtcacgcgggcatgcttcagatgctgtttccctgcaaaacatgcgagagaatgaatcagaatttcaacatttgcttcacgcacgggaccagagactgttcagaatgtttccccggcgtgtcagaatctcaaccggtcgtcagaaaaaagacgtatcggaaactctgtgcgattcatcatctgctgggggcgggcacccgagattgcttgctcggcctgcgatctggtcaacgtggacctagatgactgtgtttctgagcaataaatgacttaaaccaggtatggctgccgatggttatcttccagattggctcgaggacaacctctctgagggcattcgcgagtggtgggacttgaaacctggagccccgaaacccaaagccaaccagcaaaagcaggacgacggccggggtctggtgcttcctggctacaagtacctcggacccttcaacggactcgacaagggggagcccgtcaacgcggcggacgcagcggccctcgagcacgacaaggcctacgaccagcagctcaaagcgggtgacaatccgtacctgcggtataaccacgccgacgccgagtttcaggagcgtctgcaagaagatacgtcttttgggggcaacctcgggcgagcagtcttccaggccaagaagcgggttctcgaacctctcggtctggttgaggaaggcgctaagacggctcctggaaagaagagaccggtagagccatcaccccagcgttctccagactcctctacgggcatcggcaagaaaggccagcagcccgcgaaaaagagactcaactttgggcagactggcgactcagagtcagtgcccgaccctcaaccaatcggagaaccccccgcaggcccctctggtctgggatctggtacaatggctgcaggcggtggcgctccaatggcagacaataacgaaggcgccgacggagtgggtagttcctcaggaaattggcattgcgattccacatggctgggcgacagagtcatcaccaccagcacccgaacctgggccctccccacctacaacaaccacctctacaagcaaatctccaacgggacttcgggaggaagcaccaacgacaacacctacttcggctacagcaccccctgggggtattttgactttaacagattccactgccacttctcaccacgtgactggcagcgactcatcaacaacaactggggattccggcccaagagactcaacttcaagctcttcaacatccaggtcaaggaggtcacgcagaatgaaggcaccaagaccatcgccaataaccttaccagcacgattcaggtctttacggactcggaataccagctcccgtacgtcctcggctctgcgcaccagggctgcctgcctccgttcccggcggacgtcttcatgattcctcagtacgggtacctgactctgaacaatggcagtcaggccgtgggccgttcctccttctactgcctggagtactttccttctcaaatgctgagaacgggcaacaactttgagttcagctaccagtttgaggacgtgccttttcacagcagctacgcgcacagccaaagcctggaccggctgatgaaccccctcatcgaccagtacctgtactacctgtctcggactcagtccacgggaggtaccgcaggaactcagcagttgctattttctcaggccgggcctaataacatgtcggctcaggccaaaaactggctacccgggccctgctaccggcagcaacgcgtctccacgacactgtcgcaaaataacaacagcaactttgcctggaccggtgccaccaagtatcatctgaatggcagagactctctggtaaatcccggtgtcgctatggcaacccacaaggacgacgaagagcgattttttccgtccagcggagtcttaatgtttgggaaacagggagctggaaaagacaacgtggactatagcagcgttatgctaaccagtgaggaagaaattaaaaccaccaacccagtggccacagaacagtacggcgtggtggccgataacctgcaacagcaaaacgccgctcctattgtaggggccgtcaacagtcaaggagccttacctggcatggtctggcagaaccgggacgtgtacctgcagggtcctatctgggccaagattcctcacacggacggaaactttcatccctcgccgctgatgggaggctttggactgaaacacccgcctcctcagatcctgattaagaatacacctgttcccgcggatcctccaactaccttcagtcaagctaagctggcgtcgttcatcacgcagtacagcaccggacaggtcagcgtggaaattgaatgggagctgcagaaagaaaacagcaaacgctggaacccagagattcaatacacttccaactactacaaatctacaaatgtggactttgctgttaacacagatggcacttattctgagcctcgccccatcggcacccgttacctcacccgtaatctgtaattgcttgttaatcaataaaccggttgattcgtttcagttgaactttggtctctgcgaagggcgaattc

SEQ ID NO: 415 - protein, 738 aa, Adeno-associated virus; identical to SEQ ID NO: 31

SEQ ID NO: 416 - protein, 733 aa, Adeno-associated virus
MAADGYLPDWLEDNLSEGIREWWDLRPGAPKPKANQQKQDDGRGLVLPGYKYLGPFNGLDKGEPVNEADAAALEHDKAYDKQLEQGDNPYLKYNHADAEFQERLQEDTSFGGNLGRAVFQAKKRVLEPLGLVEEGAKTAPGKKRPIESPDSSTGIGKKGQQPAKKRLNFGQTGDSESVPDPQPIGEPPAGPSGLGSGTMAAGGGAPMADNNEGADGVGSSSGNWHCDSTWLGDRVITTSTRTWALPTYNNHLYKQISNGTSGGSTNDNTYFGYSTPWGYFDFNRFHCHFSPRDWQRLINNNWGFRPKRLNFKLFNIQVKEVTQNEGTKTIANNLTSTIQVFTDSEYQLPYVLGSAHQGCLPPFPADVFMIPQYGYLTLNNGSQAVGRSSFYCLEYFPSQMLRTGNNFEFSYQFEDVPFHSSYAHSQSLDRLMNPLIDQYLYYLSRTQSTGGTAGTQQLLFSQAGPNNMSAQAKNWLPGPCYRQQRVSTTVSQNNNSNFAWTGATKYHLNGRDSLVNPGVAMATHKGDEERFFPSSGVLMFGKQGAGKDNVDYSSVMLTSEEEIKTTNPVATEQYGVVADNLQQQNAAPIVGAVNSQGALPGMVWQNRDVYLQGPIWAKIPHTDGNFHPSPLMGGFGLKHPPPQILIKNTPVPADPPTTFSQAKLASFITQYSTGQVSVEIEWELQKENSKRWNPEIQYTSNYYKSTNVDFAVNTEGTYSEPRPIGTRYLTRNL

SEQ ID NO: 417 - DNA, 2501 bp, Adeno-associated virus
gaattcgcccttggctgcgtcaactggaccaatgagaactttcccttcaacgattgcgtcgacaagatggtgatctggtgggaggagggcaagatgacggccaaggtcgtggagtccgccaaggccattcatcatctgctggggcgggctcccgagattgcttgctcggcctgcgatctggtcaacgtggacctggatgactgtgtttctgagcaataaatgacttaaaccaggtatggctgccgatggttatcttccagattggctcgaggacaacctctctgagggcattcgcgagtggtgggacttgagacctggagccccgaaacccaaagccaaccagcaaaagcaggacgacggccggggtctggtgcttcctggctacaagtacctcggacccttcaacggactcgacaagggagagccggtcaacgaggcagacgccgcggccctcgagcacgacaaggcctacgacaagcagctcgagcagggggacaacccgtacctcaagtacaaccacgccgacgccgagtttcaggagcgtcttcaagaagatacgtcttttgggggcaacctcgggcgagcagtcttccaggccaagaagcgggttctcgaacctctcggtctggttgaggaaggcgctaagacggctcctggaaagaagagacccatagaatcccccgactcctccacgggcatcggcaagaaaggccagcagcccgctaaaaagagactcaactttgggcagactggcgactcagagtcagtgcccgaccctcaaccaatcggagaaccccccgcaggcccctctggtctgggatctggcacaatggctgcaggcggtggcgctccaatggcagacaataacgaaggcgccgacggagtgggtagttcctcaggaaattggcattgcgattccacatggctgggcgacagagtcatcaccaccagcacccgaacctgggccctccccacctacaacaaccacctctacaagcaaatctccaacgggacatcgggaggaagcaccaacgacaacacctacttcggctacagcaccccctgggggtattttgactttaacagattccactgccacttctcaccacgtgactggcagcgactcatcaacaacaactggggattccggcccaagagactcaacttcaagctcttcaacatccaggtcaaggaggtcacgcagaatgaaggcaccaagaccatcgccaataaccttaccagcacgattcaggtctttacggactcggaataccagctcccgtacgtcctcggctctgcgcaccagggctgcctgcctccgttcccggcggacgtcttcatgattcctcagtacgggtacctgactctgaacaacggcagtcaggccgtgggccgttcctccttctactgcctggagtactttccttctcaaatgctgagaacgggcaacaactttgagttcagctaccagtttgaggacgtgccttttcacagcagctatgcgcacagccaaagcctggaccggctgatgaaccccctcatcgaccagtacctgtactacctgtctcggactcagtccacgggaggtaccgcaggaactcagcagttgctattttctcaggccgggcctaataacatgtcggctcaggccaaaaactggctacccgggccctgctaccggcagcaacgcgtctccacgacagtgtcgcaaaataacaacagcaactttgcttggaccggtgccaccaagtatcatctgaatggcagagactctctggtaaatcccggtgtcgctatggcaacgcacaagggcgacgaagagcgattttttccatccagcggagtcttgatgtttgggaaacagggagctggaaaagacaacgtagactatagcagcgttatgctaaccagtgaggaagaaatcaaaaccaccaacccagtggccacagaacagtacggcgtggtggccgataacctgcaacagcaaaacgccgctcctattgtaggggccgtcaacagtcaaggagccttacctggcatggtctggcagaaccgggacgtgtacctgcagggtcctatctgggccaagattcctcacacggacggcaactttcatccttcgccgctgatgggaggctttggactgaaacacccgcctcctcagatcctgattaagaatacacctgttcccgcggatcctccaactaccttcagtcaagccaagctggcgtcgttcatcacgcagtacagcaccggacaggtcagcgtggaaattgaatgggagctgcagaaagagaacagcaagcgctggaacccagagattcagtatacttccaactactacaaatctacaaatgtggactttgctgtcaatactgagggtacttattcagagcctcgccccattggcacccgttacctcacccgtaacctgtaattgcctgttaatcaataaaccggttgattcgtttcagttgaactttggtctcaagggcgaattc

SEQ ID NO: 418 - DNA, 2187 bp, Adeno-associated virus
atggctgccgatggttatcttccagattggctcgaggacaacctctctgagggcattcgcgagtggtgggacttgaaacctggagccccgaaacccaaagccaaccagcaaaagcaggacgacggccggggtctggtgcttcctggctacaagtacctcggacccttcaacggactcgacaagggagagccggtcaacgaggcagacgccgcggccctcgagcacgacaaggcctacgacaagcagctcgagcagggggacaacccgtacctcaagtacaaccacgccgacgccgagtttcaggagcgtcttcaagaagatacgtcttttgggggcaacctcgggcgagcagtcttccaggccaagaagcgggttctcgaacctctcggtctggttgaggaaggcgctaagacggctcctggaaagaagagacccatagaatcccccgactcctccacgggcatcggcaagaaaggccagcagcccgctaaaaagaagctcaactttgggcagactggcgactcagagtcagtgcccgacccccaacctctcggagaacctcccgccgcgccctcaggtctgggatctggtacaatggctgcaggcggtggcgcaccaatggcagacaataacgaaggcgccgacggagtgggtaatgcctccggaaattggcattgcgattccacatggctgggcgacagagtcatcaccaccagcacccgcacctgggccctgcccacctacaacaaccacctctacaagcagatatcaagtcagagcggggctaccaacgacaaccacttcttcggctacagcaccccctggggctattttgacttcaacagattccactgccacttctcaccacgtgactggcagcgactcatcaacaacaactggggattccggcccagaaagctgcggttcaagttgttcaacatccaggtcaaggaggtcacgacgaacgacggcgttacgaccatcgctaataaccttaccagcacgattcaggtcttctcggactcggagtaccaactgccgtacgtcctcggctctgcgcaccagggctgcctccctccgttccctgcggacgtgttcatgattcctcagtacggatatctgactctaaacaacggcagtcagtctgtgggacgttcctccttctactgcctggagtactttccttctcagatgctgagaacgggcaataactttgaattcagctacacctttgaggaagtgcctttccacagcagctatgcgcacagccagagcctggaccggctgatgaatcccctcatcgaccagtacctgtactacctggcccggacccagagcactacggggtccacaagggagctgcagttccatcaggctgggcccaacaccatggccgagcaatcaaagaactggctgcccggaccctgttatcggcagcagagactgtcaaaaaacatagacagcaacaacaacagtaactttgcctggaccggggccactaaataccatctgaatggtagaaattcattaaccaacccgggcgtagccatggccaccaacaaggacgacgaggaccagttctttcccatcaacggagtgctggtttttggcgaaacgggggctgccaacaagacaacgctggaaaacgtgctaatgaccagcgaggaggagatcaaaaccaccaatcccgtggctacagaagaatacggtgtggtctccagcaacctgcaatcgtctacggccggaccccagacacagactgtcaacagccagggggctctgcccggcatggtctggcagaaccgggacgtgtacctgcagggtcccatctgggccaaaattcctcacacggacggcaactttcacccgtctcccctgatgggcggatttggactcaaacacccgcctcctcaaattctcatcaaaaacaccccggtacctgctaatcctccagaggtgtttactcctgccaagtttgcctcatttatcacgcagtacagcaccggccaggtcagcgtggagatcgagtgggaactgcagaaagaaaacagcaaacgctggaatccagagattcagtacacctcaaattatgccaagtctaataatgtggaatttgctgtcaacaacgaaggggtttatactgagcctcgccccattggcacccgttacctcacccgtaacctgtaa

SEQ ID NO: 419 - protein, 728 aa, Adeno-associated virus; identical to SEQ ID NO: 87

SEQ ID NO: 420 - protein, 728 aa, Adeno-associated virus; identical to SEQ ID NO: 179

SEQ ID NO: 421 - protein, 728 aa, Adeno-associated virus; identical to SEQ ID NO: 179

SEQ ID NO: 422 - protein, 733 aa, Adeno-associated virus
MAADGHLPDWLEDNLSEGIREWWDLKPGAPKPKANQQKQDDGRGLVLPGYKYLGPFNGLDKGEPVNAADAAALEHDKAYDQQLKAGDNPYLRYNHADAEFQERLQEDTSFGGNLGRAVFQAKKRVLEPLGLVEEGAKTAPGKKRPIESPDSSTGIGKKGQQPAKKKLNFGQTGDSESVPDPQPIGEPPAGPSGLGSGTMAAGGGAPMADNNEGADGVGSSSGNWHCDSTWLGDRVITTSTRTWALPTYNNHLYKQISNGTSGGSTNDNTYFGYSTPWGYFDFNRFHCHFSPRDWQRLINNSWGFRPKRLNFKLFNIQVKEVTQNEGTKTIANNLTSTIQVFTDSEYQLPYVLGSAHQGCLPPFPADVFMIPQYGYLTLNNGSQAVGRSSFYCLEYFPSQMLRTGNNFEFSYQFEDVPFHSSYAHSQSLDRLMNPLIDQYLYYLSRTQSTGGTAGTQQLLFSQAGPNNMSAQAKNWLPGPCYRQQRVSTTLSQNNNSNFAWTGATKYHLNGRDSLVNPGVAMATHKDDEERFFPSSGVLMFGKQGAGKDNVDYSSVMLTSEEEIKTTNPVATEQYGVVADNLQQQNAAPIVGAVNSQGALPGMVWQNRDVYLQGPIWAKIPHTDGNFHPSPLMGGFGLKHPPPQILIKNTPVPADPPTTFSQAKLASFITQYSTGQVSVEIEWELQKENSKRWNPEIQYTSNYYKSTNVDFAVNTEGTYSEPRPIGTRYLTRNL

SEQ ID NO: 423 - DNA, 3113 bp, Adeno-associated virus
gaattcgccctttctacggctgcgtcaactggaccaatgagaactttcccttcaacgattgcgtcgacaagatggtgatctggtgggaggagggcaagatgacggccaaggtcgtggagtccgccaaggccattctcggcggcagcaaggtgcgcgtggaccaaaagtgcaagtcgtccgcccagatcgatcccacccccgtgatcgtcacttccaacaccaacatgtgcgccgtgattgacgggaacagcaccaccttcgagcaccagcagccgttacaagaccggatgttcaaatttgaactcacccgccgtctggagcatgactttggcaaggtgacaaagcaggaagtcaaagagttcttccgctgggcgcaggatcacgtgaccgaggtggcgcatgagttctacgtcagaaagggtggagccaacaagagacccgcccccgatgacgcggataaaagcgagcccaagcgggcctgcccctcagtcgcggatccatcgacgtcagacgcggaaggagctccggtggactttgccgacaggtaccaaaacaaatgttctcgtcacgcgggcatgcttcagatgctgcttccctgcaagacatgcgagagaatgaatcagaatttcagcatttgcttcacgcacgggaccagagactgttcagaatgtttccccggcgtgtcagaatctcaaccggtcgtcagaaagaggacgtatcggaaactctgtgccattcatcatctgctggggcgggctcccgagattgcttgctcggcctgcgatctggtcaacgtggacctggatgactgtgtttctgagcaataaatgacttaaaccaggtatggctgccgatggtcatcttccagattggctcgaggacaacctctctgagggcattcgcgagtggtgggacttgaaacctggagccccgaaacccaaagccaaccagcaaaagcaggacgacggccggggtctggtgcttcctggctacaagtacctcggacccttcaacggactcgacaagggggagcccgtcaacgcggcggacgcagcggccctcgagcacgacaaggcctacgaccagcagctcaaagcgggtgacaatccgtacctgcggtataaccacgccgacgccgagtttcaggagcgtcttcaagaagatacgtcttttgggggcaacctcgggcgagcagtcttccaggccaagaagcgggttctcgaacctctcggtctggttgaggaaggcgctaagacggctcctggaaagaagagacccatagaatcccccgactcctccacgggcatcggcaagaaaggccagcagcccgctaaaaagaagctcaactttgggcagactggcgactcagagtcagtgcccgaccctcaaccaatcggagaaccccccgcaggcccctctggtctgggatctggtacaatggctgcaggcggtggcgctccaatggcagacaataacgaaggcgccgacggagtgggtagttcctcaggaaattggcattgcgattccacatagctgggcgacagagtcatcaccaccagcacccgaacctgggccctccccacctacaacaaccacctctacaagcaaatctccaacgggacatcgggaggaagcaccaacgacaacacctacttcggctacagcaccccctgggggtattttgactttaacagattccactgccacttctcaccacgtgactggcagcgactcatcaacaacagctggggattccggcccaagagactcaacttcaagctcttcaacatccaggtcaaggaggtcacgcagaatgaaggcaccaagaccatcgccaataaccttaccagcacgattcaggtctttacggactcggaataccagctcccgtacgtcctcggctctgcgcaccagggctgcctgcctccgttcccggcggacgtcttcatgattcctcagtacgggtacctgactctgaacaacggcagtcaggccgtgggccgttcctccttctactgcctggagtactttccttctcaaatgctgagaacgggcaacaactttgagttcagctaccagtttgaggacgtgccttttcacagcagctacgcgcacagccaaagcctggaccggctgatgaaccccctcatcgaccagtacctgtactacctgtctcggactcagtccacgggaggtaccgcaggaactcagcagttgctattttctcaggccgggcctaataacatgtcggctcaggccaaaaactggctacccgggccctgctaccggcagcaacgcgtctccacgacactgtcgcaaaataacaacagcaactttgcttggaccggtgccaccaagtatcatctgaatggcagagactctctggtaaatcccggtgtcgctatggcaacgcacaaggacgacgaagagcgattttttccatccagcggagtcttgatgtttgggaaacagggagctggaaaagacaacgtggactatagcagcgttatgctaaccagtgaggaagaaatcaaaaccaccaacccagtggccacagaacagtacggcgtggtggccgataacctgcaacagcaaaacgccgctcctattgtaggggccgtcaacagtcaaggagccttacctggcatggtctggcagaaccgggacgtgtacctgcagggtcctatctgggccaagattcctcacacggacggcaactttcatccttcgccgctgatgggaggctttggactgaaacacccgcctcctcagatcctgattaagaatacacctgttcccgcggatcctccaactaccttcagtcaagccaagctggcgtcgttcatcacgcagtacagcaccggacaggtcagcgtggaaattgaatgggagctgcagaaagagaacagcaagcgctggaacccagagattcagtatacttccaactactacaaatctacaaatgtggactttgctgtcaatactgagggtacttattcagagcctcgccccattggcacccgttacctcacccgtaacctgtaattgcctgttaatcaataaaccggttaattcgtttcagttgaactttggtctctgcgaagggcgaattc

SEQ ID NO: 424 - protein, 731 aa, Adeno-associated virus
MAADGYLPDWLEDNLSEGIREWWDLKPGAPKPKANQQKQDDGRGLVLPGYKYLGPFNGLDKGEPVNEADAAALEHDKAYDKQLEQGDNPYLKYNHADAEFQERLQEDTSFGGNLGRAVFRAKKRVLEPLGLVEEGAKTAPGKKRPIESPDSSTGIGKKGQQPAKKKLNFGQTGDSESVPDPQPLGEPPAAPSGLGSGTMAAGGGAPMADNNEGADGVGNASGNWHCDSTWLGDRVITTSTRTWALPTYNNHLYKQISSQSGATNDNHFFGYSTPWGYFDFNRFHCHFSPRDWQRLINNNRGFRPRKLRFKLFNIQVKEVTTNDGVTTIANNLTSTIQVFSDSEYQLPYVLGSAHQGCLPPFPADVFMIPQYGYLTLNNGSQSVGRSSFYCLEYFPSQMLRTGNNFEFSYQFEDVPFHSSYAHSQSLDRLMNPLIDQYLYYLSRTQSTGGTAGTQQLLFSQAGPNNMSAQAKNWLPGPCYRQQRVSTTLSQNNNSNFAWTGATKYHLNGRDSLVNPGVAMATHKDDEERFFPSSGVLMFGKQGAGKDNVDYSSVMLTSEEEIKTTNPVATEQYGVVADNLQQQNAAPIVGAVNSQGALPGMAWQNRDVYLQGPIWAKIPHTDGNFHPSPLMGGFGLKHPPPQILIKNTPVPADPPTTFSQAKLASFITQYSTGQVSVEIEWELQKENSKRWNPEIQYTSNYYKSTNVDFAVNTEGTYSEPRPIGTRYLTRNL

SEQ ID NO: 425 - DNA, 3106 bp, Adeno-associated virus
gaattcgcccttctacggctgcgtcaactggaccaatgagaactttcccttcaacgattgcgtcgacaagatggtgatctggtgggaggagggcaagatgacggccaaggtcgtggagtccgccaaggccattctcggcggcagcaaggtgcgcgtggaccaaaagtgcaagtcgtccgcccagatcgaccccacccccgtgatcgtcacctccaacaccaacatgtgcgccgtgattgacgggaacagcaccaccttcgagcaccagcagccgttgcaggaccggatgttcaaatttgaactcacccgccgtctggagcatgactttggcaaggcgacaaagcaggaagtcaaagagttcttccgctgggcgcaggatcacgtgaccgaggtggcgcatgagttctacgtcagaaagggtggagccaacaagagacccgcccccgatgacgcggataaaagcgagcccaagcgggcccgcccctcagtcgcggatccatcgacgtcagacgcggaaggagctccggtggactttgccgacaggtaccaaaacaaatgttctcgtcacgcgggcatgcttcagatgctgtttccctgcaaaacatgcgagagaatgaatcagaatttcaacatttgcttcacgcacgggaccagagactgttcagaatgtttccccggcgtgtcagaatctcaaccggtcgtcagaaagaggacgtatcggaaactctgtgccattcatcatctgctggggcgggctcccgagattgcttgctcggcctgcgatctggtcaacgtggacctggatgactgtgtttctgagcaataaatgacttaaaccaggtatggctgccgatggttatcttccagattggctcgaggacaacctctctgagggcattcgcgagtggtgggacttgaaacctggagccccgaaacccaaagccaaccagcaaaagcaggacgacggccggggtctggtgcttcctggctacaagtacctcggacccttcaacggactcgacaagggagagccggtcaacgaggcagacgccgcggccctcgagcacgacaaggcctacgacaagcagctcgagcagggggacaacccgtacctcaagtacaaccacgccgacgccgagtttcaggagcgtcttcaagaagatacgtcttttgggggcaacctcgggcgagcagtcttccgggccaagaagcgggttctcgaacctctcggtctggttgaggaaggcgctaagacggctcctggaaagaagagacccatagaatcccccgactcctccacgggcatcggcaagaaaggccagcagcccgctaaaaagaagctcaactttgggcagactggcgactcagagtcagtgcccgacccccaacctctcggagaacctcccgccgcgccctcaggtctgggatctggtacaatggctgcaggcggtggcgcaccaatggcagacaataacgaaggcgccgacggagtgggtaatgcctccggaaattggcattgcgattccacatggctgggcgacagagtcatcaccaccagcacccgcacctgggccctgcccacctacaacaaccacctctacaagcagatatcaagtcagagcggggctaccaacgacaaccacttcttcggctacagcaccccctggggctattttgacttcaacagattccactgccacttctcaccacgtgactggcagcgactcatcaacaacaaccggggattccggcccagaaagctgcggttcaagttgttcaacatccaggtcaaggaggtcacgacgaacgacggcgttacgaccatcgctaataaccttaccagcacgattcaggtcttctcggactcggagtaccaactgccgtacgtcctcggctctgcgcaccagggctgcctccctccgttccctgcggacgtgttcatgattcctcagtacggatatctgactctaaacaacggcagtcagtctgtgggacgttcctccttctactgcctggagtactttccttctcagatgctgagaacgggcaataactttgaattcagctaccagtttgaggacgtgccctttcacagcagctacgcgcacagccaaagcctggaccggctgatgaaccccctcatcgaccagtacctgtactacctgtctcggactcagtccacgggaggtaccgcaggaactcagcagttgctattttctcaggccgggcctaataacatgtcggctcaggccaaaaactggctacccgggccctgctaccggcagcaacgcgtctccacgacactgtcgcaaaataacaacagcaactttgcttggaccggtgccaccaagtatcatctgaatggcagagactctctggtaaatcccggtgtcgctatggcaacgcacaaggacgacgaagagcgattttttccatccagcggagtcttgatgtttgggaaacagggagctggaaaagacaacgtggactatagcagcgttatgctaaccagtgaggaagaaatcaaaaccaccaacccagtggccacagaacagtacggcgtggtggccgataacctgcaacagcaaaacgccgctcctattgtaggggccgtcaacagtcaaggagccttacctggcatggcctggcagaaccgggacgtgtacctgcagggtcctatctgggccaagattcctcacacggacggcaactttcatccttcgccgctgatgggaggctttggactgaaacacccgcctcctcagatcctgattaagaatacacctgttcccgcggatcctccaactaccttcagtcaagccaagctggcgtcgttcatcacgcagtacagcaccggacaggtcagcgtggaaattgaatgggagctgcagaaagagaacagcaagcgctggaacccagagattcagtatacttccaactactacaaatctacaaatgtggactttgctgtcaatactgagggtacttattcagagcctcgccccattggcacccgttacctcacccgtaacctgtaattgcctgttaatcaataaaccggttaattcgtttcagttgaactttggtctctgcgaagggcgaattc

SEQ ID NO: 426 - protein, 738 aa, Adeno-associated virus
MAADGYLPDWLEDNLSEGIREWWDLKPGAPKPKANQQKQDDGRGLVLPGYKYLGPFNGLDKGEPVNEADAAALEHDKAYDKQLEQGDNPYLKYNHADAEFQERLQEDTSFGGNLGRAVFQAKKRVLEPLGLVEEGAKTAPGKKRPVEPSPQRSPDSSTGIGKTGQQPAKKRLNFGQTGDSESVPDPQPIGEPPAGPSGLGSGTMAAGGGAPMADNNEGADGVGSSSGNWHCDSTWLGDRVITTSTRTWALPTYNNHLYKQISNGTSGGSTNDNTYFGYSTPWGYFDFNRFHCHFSPRDWQRLINNNWGFRPKRLNFKLFNIQVKEVTQNEGTKTIANNLTSTIQVFTDSEYQLPYVLGSAHQGCLPPFPADVFMIPQYGYLTLNNGSQAVGRSSFYCLEYFPSQMLRTGNNFEFSYQFEDVPFHSSYAHSQSLDRLMNPLIDQYLYYLSRTQSTGGTAGTQQLLFSQAGPNNMSAQAKNWLPGPCYRQQRVSTTLSQNNNSNFAWTGATKYHLNGRDSLVNPGVAMATHKDDEERFFPSSGVLMFGKQGAGKDNVDYSSVMLTSEEEIKTTNPVATEQYGVVADNLQQQNAAPIVGAVNSQGALPGMVWQNRDVYLQGPIWAKIPHTDGNFHPSPLMGGFGLKHPPPQILIKNTPVPADPPTTFSQAKLASFITQYSTGQVSVEIEWELQKENSKRWNPEIQYTSNYYKSTNVDFAVNTEGTYSEPRPIGTRYLTRNL

SEQ ID NO: 427 - DNA, 3197 bp, Adeno-associated virus
gaattcgccctttctacggctgcgtcaactggaccaatgagaactttcccttcaacgattgcgtcgacaagatggtgatctggtgggaggagggcaagatgacggccaaggtcgtggagtccgccaaggccattctcggcggcagcaaggtgcgcgtggaccaaaagtgcaagtcgtccgcccagatcgaccccacccccgtgatcgtcacctccaacaccaacatgtgcgccgtgattgacgggaacagcaccaccttcgagcaccagcagccgttacaagaccggatgttcaaatttgaactcacccgccgtctggagcacgactttggcaaggtgacaaagcaggaagtcaaagagttcttccgctgggcgcaggatcacgtgaccgaggtggcgcatgagttctacgtcagaaagggtggagccaacaagagacccgcccccgatgacgcggataaaagcgagcccaagcgggcctgcccctcagtcgcggatccatcgacgtcagacgcggaaggagctccggtggactttgccgacaggtaccaaaacaaatgttctcgtcacgcgggcatgcttcagatgctgtttccctgcaagacatgcgagagaatgaatcagaatttcaacatttgcttcacgcacgggaccagagactgttcagaatgtttccccggcgtgtcagaatctcaaccggtcgtcagaaagaggacgtatcggaaactctgtgccattcatcatctgctggggcgggctcccgagattgcttgctcggcctgcgatctggtcaacgtggacctggatgactgtgtttctgagcaataaatgacttaaaccaggtatggctgccgatggttatcttccagattggctcgaggacaacctctctgagggcattcgcgagtggtgggacttgaaacctggagccccgaaacccaaagccaaccagcaaaagcaggacgacggccggggtctggtgcttcctggctacaagtacctcggacccttcaacggactcgacaagggagagccggtcaacgaggcagacgccgcggccctcgagcacgacaaggcctacgacaagcagctcgagcagggggacaacccgtacctcaagtacaaccacgccgacgccgagtttcaggagcgtcttcaagaagatacgtcttttgggggcaacctcgggcgagcagtcttccaggccaagaagcgggttctcgaacctctcggtctggttgaggaaggcgctaagacggctcctggaaagaagagaccggtagagccatcaccccagcgttctccagactcctctacgggcatcggcaagacaggccagcagcccgcgaaaaagagactcaactttgggcagactggcgactcagagtcagtgcccgaccctcaaccaatcggagaaccccccgcaggcccctctggtctgggatctggtacaatggctgcaggcggtggcgctccaatggcagacaataacgaaggcgccgacggagtgggtagttcctcaggaaattggcattgcgattccacatggctgggcgacagagtcatcaccaccagcacccgaacctgggccctccccacctacaacaaccacctctacaagcaaatctccaacgggacatcgggaggaagcaccaacgacaacacctacttcggctacagcaccccctgggggtattttgactttaacagattccactgccacttctcaccacgtgactggcagcgactcatcaacaacaactggggattccggcccaagagactcaacttcaagctcttcaacatccaggtcaaggaggtcacgcagaatgaaggcaccaagaccatcgccaataaccttaccagcacgattcaggtctttacggactcggaataccagctcccgtacgtcctcggctctgcgcaccagggctgcctgcctccgttcccggcggacgtcttcatgattcctcagtacgggtacctgactctgaacaacggcagtcaggccgtgggccgttcctccttctactgcctggagtactttccttctcaaatgctgagaacgggcaacaactttgagttcagctaccagtttgaggacgtgccttttcacagcagctacgcgcacagccaaagcctggaccggctgatgaaccccctcatcgaccagtacctgtactacctgtctcggactcagtccacgggaggtaccgcaggaactcagcagttgctattttctcaggccgggcctaataacatgtcggctcaggccaaaaactggctacccgggccctgctaccggcagcaacgcgtctccacgacactgtcgcaaaataacaacagcaactttgcttggaccggtgccaccaagtatcatctgaatggcagagactctctggtaaatcccggtgtcgctatggcaacgcacaaggacgacgaagagcgattttttccatccagcggagtcttgatgtttgggaaacagggagctggaaaagacaacgtggactatagcagcgttatgctaaccagtgaggaagaaatcaaaaccaccaacccagtggccacagaacagtacggcgtggtggccgataacctgcaacagcaaaacgccgctcctattgtaggggccgtcaacagtcaaggagccttacctggcatggtctggcagaaccgggacgtgtacctgcagggtcctatctgggccaagattcctcacacggacggcaactttcatccttcgccgctgatgggaggctttggactgaaacacccgcctcctcagatcctgattaagaatacacctgttcccgcggatcctccaactaccttcagtcaagccaagctggcgtcgttcatcacgcagtacagcaccggacaggtcagcgtggaaattgaatgggagctgcagaaagagaacagcaagcgctggaacccagagattcagtatacttccaactactacaaatctacaaatgtggactttgctgtcaatactgagggtacttattcagagcctcgccccattggcacccgttacctcacccgtaacctgtaattgcctgttaatcaataaaccggttaattcgtttcagttgaactttggtctctgcgaagggcgaattcgtttaaacctgcaggactagtccctttagtgagggttaattctgagcttggcgtaatcatgggtcatag

SEQ ID NO: 428 - protein, 735 aa, Adeno-associated virus
MAADGYLPDWLEDNLSEGIREWWDLKPGAPKPKANQQKQDDGRGLVLPGYKYLGPFNGLDKGEPVNEADAAALEHDKAYDKQLEQGDNPYLKYNHADAEFQERLQEDTSFGGNLGRAVFQAKKRVLEPLGLVEEGAKTAPGKKRPVEPSPQRSPDSSTGIGKTGQQPAKKRLNFGQTGDSESVPDPQPIGEPPAGPSGLGSGTMAAGGGAPMADNNEGADGVGSSSGNWHCDSTWLGDRVITTSTRTWALPTYNNHLYKQISNGTSGGSTNDNTYFGYSTPWGYFDFNRFHCHFSPRDWQRLINNNWGFRPRKLRFKLFNIQVKEVTTDDGVTTIANNLTSTIQVFSDSEYQLPYVLGSAHQGCLPPFPADVFMIPQYGYLTLNNGSQSVGRSSFYCLEYFPSQMLRTGNNFEFSYTFEEVPFHSSYAHSQSLDRLMNPLIDQYLYYLARTQSTTGSTRELQFHQAGPNTMAEQSKNWLPGPCYRQQRLSKNIDSNNNSNFAWTGATKYHLNGRNSLTNPGVAMATNKDDEDQFFPINGVLVFGKTGAANKTTLENVLMTSEEEIKTTNPVATEEYGVVSSNLQSSTAGPQTQTVNSQGALPGMVWQNRDVYLQGPIWAKIPHTDGNFHPSPLMDGFGLKHPPPQILIKNTPVPANPPEVFTPAKFASFITQYSTGQVSVEIEWELQKENSKRWNPEIQYTSNYAKSNNVEFAVNNEGVYTEPRPIGTRYLTRNL

SEQ ID NO: 429 - DNA, 3276 bp, Adeno-associated virus
gaattcgcccttcgcagagaccaaagttcaactgaaacgaattaaccggtttattgattaacaggcaattacaggttacgggtgaggtaacgggtgccaatggggcgaggctcagtataaaccccttcgttgttgacagcaaattccacattattagacttggcataatttgaggtgtactgaatctctggattccagcgtttgctgttttctttctgcagttcccactcgatctccacgctgacctggccggtgctgtactgcgtgataaatgaggcaaacttggcaggagtaaacacctctggaggattagcaggtaccggggtgtttttgatgagaatttgaggaggcgggtgtttgagtccaaatccgtccatcaggggagacgggtgaaagttgccgtccgtgtgaggaattttggcccagatgggaccctgcaggtacacgtcccggttctgccagaccatgccgggcagagccccctggctgttgacagtctgtgtctggggtccggccgtagacgattgcaggttgctggagaccacaccgtattcttctgtagccacgggattggtggttttgatctcctcctcgctggtcattagcacgttttccagcgttgtcttgttggcagcccccgttttgccaaaaaccagcactccgttgatgggaaagaactggtcctcgtcgtccttgttggtggccatggctacgcccgggttggttaatgaatttctaccattcagatggtatttagtggccccggtccaggcaaagttactgttgttgttgctgtctatgttttttgacagtctctgctgccgataacagggtccgggcagccagttctttgattgctcggccatggtgttgggcccagcctgatggaactgcagctcccttgtggaccccgtagtgctctgggtccgggccaggtagtacaggtactggtcgatgaggggattcatcagccggtccaggctctggctatgcgcatagctgctgtggaaaggcacttcctcaaaggtgtagctgaattcaaagttattgcccgttctcagcatctgagaaggaaagtactccaggcagtagaaggaggaacgtcccacagactgactgccgttgtttagagtcagatatccgtactgaggaatcatgaacacgtccgcagggaacggagggaggcagccctggtgcgcagagccgaggacgtacggcagttggtactccgagtccgagaagacctgaatcgtgctggtaaggttattagcgatggtcgtaacgccgtcgtccgtcgtgacctccttgacctggatgttgaacaacttgaaccgcagctttctgggccggaatccccagttgttgttgatgagtcgctgccagtcacgtggtgagaagtggcagtggaatctgttaaagtcaaaatacccccagggggtgctgtagccgaagtaggtgttgtcgttggtgcttcctcccgatgtcccgttggagatttgcttgtagaggtggttgttgtaggtggggagggcccaggttcgggtgctggtggtgatgactctgtcgcccagccatgtggaatcgcaatgccaatttcctgaggaactacccactccgtcggcgccttcgttattgtctgccattggagcgccaccgcctgcagccattgtaccagatcccagaccagaggggcctgcggggggttctccgattggttgagggtcgggcactgactctgagtcgccagtctgcccaaagttgagtctctttttcgcgggctgctggcctgtcttgccgatgcccgtagaggagtctggagaacgctggggtgatggctctaccggtctcttctttccaggagccgtcttagcgccttcctcaaccagaccgagaggttcgagaacccgcttcttggcctggaagactgctcgcccgaggttgcccccaaaagacgtatcttcttgaagacgctcctgaaactcggcgtcggcgtggttgtacttgaggtacgggttgtccccctgctcgagctgcttgtcgtaggccttgtcgtgctcgagggccgcggcgtctgcctcgttgaccggctctcccttgtcgagtccgttgaagggtccgaggtacttgtagccaggaagcaccagaccccggccgtcgtcctgcttttgctggttggctttgggtttcggggctccaggtttcaagtcccaccactcgcgaatgccctcagagaggttgtcctcgagccaatctggaagataaccatcggcagccatacctggtttaagtcatttattgctcagaaacacagtcatccaggtccacgttgaccagatcgcaggccgagcaagcaatctcgggagcccgccccagcagatgatgaatggcacagagtttccgatacgtcctctttctgacgaccggttgagattctgacacgccggggaaacattctgaacagtctctggtcccgtgcgtgaagcaaatgttgaaattctgattcattctctcgcatgtcttgcagggaaacagcatctgaagcatgcccgcgtgacgagaacacttgttttggtacctgtcggcaaagtccaccggagctccttccgcgtctgacgtcgatggatgcaaaatgtcgcaaaagcactcacgtgacagctaatacaggaccactcccctatgacgtgatttacgtcagcgctatgcccgcgtgacgagaacatttgttttggtacctgtcggcaaagtccaccggagctccttccgcgtctgacgtcgatggatccgcgactgaggggcaggcccgcttgggctcgcttttatccgcgtcatcgggggcgggtctcttgttggctccaccctttctgacgtagaactcatgcgccacctcggtcacgtgatcctgcgcccagcggaagaactctttgacttcctgctttgtcaccttgccaaagtcatgctccagacggcgggtgagttcaaatttgaacatccggtcctgcaacggctgctggtgctcgaaggtggtgctgttcccgtcaatcacggcgcacatgttggtgttggaagtgacgatcacgggggtgggatcgatctgggcggaagacttgcacttttggtccacgcgcaccttgctgccgccgagaatggccttggcggactccacgaccttggccgtcatcttgccctcctcccaccagatcaccatcttgtcgacgcaatcgttgaagggaaagttctcattggtccagttgacgcagccgtagaaagggcgaattc

SEQ ID NO: 430 - protein, 738 aa, Adeno-associated virus; identical to SEQ ID NO: 95

SEQ ID NO: 431 - protein, 738 aa, Adeno-associated virus
MAADGYLPDWLEDNLSEGIREWWDLKPGAPKPKANQQKQDDGRGLVLPGYKYLGPFNGLDKGEPVNAADAAALEHDKAYDQQLKAGDNPYLRYNHADAEFQERLQEDTSFGGNLGRAVFQAKKRVLEPLGLVEEGAKTAPGKKRPVEPSPQRSPDSSTGIGKKGHQPARKRLNFGQTGDSESVPDPQPIGEPPAGPSGLGSGTMAAGGGAPMADNNEGADGVGSSSGNWHCDSTWLGDRVITTSTRTWALPTYNNHLYKQISNGTSGGSTNDNTYFGYSTPWGYFDFNRFHCHFSPRDWQRLINNNWGFRPKRLNFKLFNIQVKEVTQNEGTKTIANNLTSTIQVFTDSEYQLPYVPGSAHQGCLPPFPADVFMIPQYGYLTLNNGSQAVGRSSFYCLEYFPSQMLRTGNNFEFSYTFEDVPFHSSYAHSQSLDRLMNPLIDQYLYYLSRTQSTGGTQGTQQLLFSQAGPANMSAQAKNWLPGPCYRQQRVSTTLSQNNNSNFAWTGATKYHLNGRDSLVNPGVAMATHKDDEERFFPSSGVLMFGKQGAGKDNVDYSSVMLTSEEEIKTTNPVATEQYGVVADNLQQTNGAPIVGTVNSQGALPGMVWQNRDVYLQGPIWAKIPHTDGNFHPSPLMGGFGLKHPPPQILIKNTPVPADPPTTFSQAKLASFITQYSTGQVSVEIEWELQKENSKRWNPEIQYTSNYYKSTNVDFAVNTEGTYSEPRPIGTRYLTRNL

SEQ ID NO: 432 - protein, 738 aa, Adeno-associated virus; identical to SEQ ID NO: 93

SEQ ID NO: 433 - protein, 728 aa, Adeno-associated virus
MAADGYLPDWLEDNLSEGIREWWDLKPGAPKPKANQQKQDDGRGLVLPGYKYLGPFNGLDKGEPVNEADAAALEHDKAYDKQLEQGDNPYLKYNHADAEFQERLQEDTSFGGNLGRAVFQAKKRVLEPLGLVEEGAKTAPGKKRPIESPDSSTGIGRKGQQPAKKKLNFGQTGDSESVPDPQPIGEPPAGPSGLGSGTMAAGGGAPMADNNEGADGVGNASGNWHCDSTWLGDRVITTSTRTWALPTYNNHLYKQISSQSGATNDNHFFGYSTPWGYFDFNRFHCHFSPRDWQRLINNNWGFRPRKLRFKLFNIQVKEVTTNDGVTTIANNLTSTIQVFSDSEYQLPYVLGSAHQGCLPPFPADVFMIPQYGYLTLNNGSQSVGRSSFYCLEYFPSQMLRTGNNFEFSYTFEEVPFHSSYAHSQSLDRLMNPLIDQYLYYLARTQSTTGSTRELQFHQAGPNTMAEQSKNWLPGPCYRQQRLSKNIDSNNNSNFAWTGATKYHLNGRNSLTNPGVAMATNKDDEDQFFPINGVLVFGKTGAANKTTLENVLMTSEEEIKTTNPVATEEYGVVSSNLQSSTAGPQTQTVNSQGALPGMVWQNRDVYLQGPIWAKIPHTDGNFHPSPLMGGFGLKHPPPQILIKNTPVPANPPEVFTPAKFASFITQYSTGQVSVEIEWELQKENSKRWNPEIQYTSNYAKSNNVEFAVNNEGVYTEPRPIGTRYLTRNL

SEQ ID NO: 434 - DNA, 2489 bp, Adeno-associated virus
gaattcgccctttctacggctgcgtcaactggaccaatgagaactttcccttcaacgattgcgtcgacaagatggtgatctggtgggaggagggcaagatgacggccaaggtcgtgaagtccgccaaggccattcatcatctgctggggcgggctcccgagattgcttgctcggcctgcgatctggtcaacgtggacctggatgactgtgtttctgagcaataaatgacttaaaccaggtatggctgccgatggttatcttccagattggctcgaggacaacctctctgagggcattcgcgagtggtgggacttgaaacctggagccccgaaacccaaagccaaccagcaaaagcaggacgacggccggggtctggtgcttcctggctacaagtacctcggacccttcaacggactcgacaagggagagccggtcaacgaggcagacgccgcggccctcgagcacgacaaggcctacgacaagcagctcgagcagggggacaacccgtacctcaagtacaaccacgccgacgccgagtttcaggagcgtcttcaagaagatacgtcttttgggggcaacctcgggcgagcagtcttccaggccaagaagcgggttctcgaacctctcggtctggttgaggaaggcgctaagacggctcctggaaagaagagacccatagaatcccccgactcctccacgggcatcggcaggaaaggccagcagcccgctaaaaagaagctcaactttgggcagactggcgactcagagtcagtgcccgaccctcaaccaatcggagaaccccccgcaggcccctctggtctgggatctggtacaatggctgcaggcggtggcgctccaatggcagacaataacgaaggcgccgacggagtgggtaatgcctccggaaattggcattgcgattccacatggctgggcgacagagtcatcaccaccagcacccgcacctgggccctgcccacctacaacaaccacctctacaagcagatatcaagtcagagcggggctaccaacgacaaccacttcttcggctacagcaccccctggggctattttgacttcaacagattccactgccacttctcaccacgtgactggcagcgactcatcaacaacaactggggattccggcccagaaagctgcggttcaagttgttcaacatccaggtcaaggaggtcacgacgaacgacggcgttacgaccatcgccaataaccttaccagcacgattcaggtcttctcggactcggagtaccaactgccgtacgtcctcggctctgcgcaccagggctgcctccctccgttccctgcggacgtgttcatgattcctcagtacggatatctgactctaaacaacggcagtcagtctgtgggacgttcctccttctactgcctggagtactttccttctcagatgctgagaacgggcaataactttgaattcagctacacctttgaggaagtgcctttccacagcagctatgcgcacagccagagcctggaccggctgatgaatcccctcatcgaccagtacctgtactacctggcccggacccagagcactacggggtccacaagggagctgcagttccatcaggctgggcccaacaccatggccgagcaatcaaagaactggctgcccggaccctgttatcggcagcagagactgtcaaaaaacatagacagcaacaacaacagtaactttgcctggaccggggccactaaataccatctgaatggtagaaattcattaaccaacccgggcgtagccatggccaccaacaaggacgacgaggaccagttctttcccatcaacggagtgctggtttttggcaaaacgggggctgccaacaagacaacgctggaaaacgtgctaatgaccagcgaggaggagatcaaaaccaccaatcccgtggctacagaagaatacggtgtggtctccagcaacctgcaatcgtctacggccggaccccagacacagactgtcaacagccagggggctctgcccggcatggtctggcagaaccgggacgtgtacctgcagggtcccatctgggccaaaattcctcacacggacggcaactttcacccgtctcccctgatgggcggatttggactcaaacacccgcctcctcaaattctcatcaaaaacaccccggtacctgctaatcctccagaggtgtttactcctgccaagtttgcctcatttatcacgcagtacagcaccggccaggtcagcgtggagatcgagtgggaactgcagaaagaaaacagcaaacgctggaatccagagattcagtacacctcaaattatgccaagtctaataatgtggaatttgctgtcaacaacgaaggggtttatactgagcctcgccccattggcacccgttacctcacccgtaacctgtaattgcctgttaatcaataaaccggttaattcgtttcagttgaactttggtcaagggcgaattc

SEQ ID NO: 435 - protein, 728 aa, Adeno-associated virus
MAADGYLPDWLEDNLSEGIREWWDLKPGAPKPKANQQKQDDGRGLVLPGYKYLGPFNGLDKGEPVNAADAAALEHDKAYDQQLKAGDNPYLRYNHADAEFQERLQEDTSFGGNLGRAVFQAKKRVLEPLGLVEEGAKTAPGKKRPIESPDSSTGIGKKGQQPAKKKLNFGQTGDSESVPDPQPIGEPPAGPSGLGSGTMAAGGGAPMADNNEGADGVGNASGNWHCDSTWLGDRVITTSTRTWALPTYNNHLYKQISSQSGATNDNHFFGYSTPWGYFDFNRFHCHFSPRDWQRLINNNWGFRPRKLRFKLFNIQVKEVTTNDGVTTIANNLTSTIQVFSDSEYQLPYVLGSAHQGCLPPFPADVFMIPQYGYLTLNNGSQSVGRSSFYCLEYFPSQMLRTGNNFEFSYTFEEVPFHSSYAHSQSLDRLMNPLIDQYLYYLARTQSTTGSTRELQFHQAGPNTMAEQSKNWLPGPCYRRQRLSKDIDSNNNSNFAWTGATKYHLNGRNSLTNPGVAMATNKDDEDQFFPINGVLVFGKTGAANKTTLENVLMTSEEEIKTTNPVATEEYGVVSSNLQSSTAGPQTQTVNSQGALPGMVWQNRDVYLQGPIWAKIPHTDGNFHPSPLMGGFGLKHPPPQILIKNTPVPANPPEVFTPAKFASFITQYSTGQVSVEIEWELQKENSKRWNPEIQYTSNYAKSNNVEFAVNNEGVYTEPRPIGTRYLTRNL

SEQ ID NO: 436 - DNA, 3098 bp, Adeno-associated virus
gaattcgccctttctacggctgcgtcaactggaccaatgagaactttcccttcaacgattgcgtcgacaagatggtgatctggtgggaggagggcaagatgacggccaaggtcgtggagtccgccaaggccattctcggcggcagcaaggtgcgcgtggaccaaaagtgcaagtcttccgcccagatcgatcccacccccgtgatcgtcacttccaacaccaacatgtgcgccgtgattgacgggaacagcaccaccttcgagcaccagcagccgttacaagaccggatgttcaaatttgaactcacccgccgtctggagcacgactttggcaaggtgacaaagcaggaagtcaaagagttcttccgctgggcgcaggatcacgtgaccgaggtggcgcatgagttctacgtcagaaagggtggagccaacaagagacccgcccccgatgacgcggataaaagcgagcccaagcgggcctgcccctcagtcgcggatccatcgacgtcagacgcggaaggagctccggtggactttgccgacaggtaccaaaacaaatgttctcgtcacgcgggcatgcttcagatgctgtttccctgcaagacatgcgagagaatgaatcagaatttcaacatttgcttcacgcacgggaccggagactgttcagaatgtttccccggcgtgtcagaatctcaaccggtcgtcagaaagaggacgtatcggaaactctgtgccattcatcatctgctggggcgggctcccgagattgcttgctcggcctgcgatctggtcaacgtggacctggatgactgtgtttctgagcaataaatgacttaaaccaggtatggctgccgatggttatcttccagattggctcgaggacaacctctctgagggcattcgcgagtggtgggacttgaaacctggagccccgaaacccaaagccaaccagcaaaagcaggacgacggccggggtctggtgcttcctggctacaagtacctcggacccttcaacggactcgacaagggagagccggtcaacgcggcggacgcagcggccctcgagcacgacaaggcctacgaccagcagctcaaagcgggtgacaatccgtacctgcggtataaccacgccgacgccgagtttcaggagcgtcttcaagaagatacgtcttttgggggcaacctcgggcgagcagtcttccaggccaagaagcgggttctcgaacctctcggtctggttgaggaaggcgctaagacggctcctggaaagaagagacccatagaatcccccgactcctccacgggcatcggcaagaaaggccagcagcccgctaaaaagaagctcaactttgggcagactggcgactcagagtcagtgcccgaccctcaaccaatcggagaaccccccgcaggcccctctggtctgggatctggtacaatggctgcaggcggtggcgctccaatggcagacaataacgaaggcgccgacggagtgggtaatgcctccggaaattggcattgcgattccacatggctgggcgacagagtcatcaccaccagcacccgcacctgggccctgcccacctacaacaaccacctctacaagcagatatcaagtcagagcggggctaccaacgacaaccacttcttcggctacagcaccccctggggctattttgacttcaacagattccactgccacttctcaccacgtgactggcagcgactcatcaacaacaactggggattccggcccagaaagctgcggttcaagttgttcaacatccaggtcaaggaggtcacgacgaacgacggcgttacgaccatcgctaataaccttaccagcacgattcaggtcttctcggactcggagtaccaactgccgtacgtcctcggctctgcgcaccagggctgcctccctccgttccctgcggacgtgttcatgattcctcagtacggatatctgactctaaacaacggcagtcagtctgtgggacgttcctccttctactgcctggagtactttccttctcagatgctgagaacgggcaataactttgaattcagctacacctttgaggaagtgcctttccacagcagctatgcgcacagccagagcctggaccggctgatgaatcccctcatcgaccagtacctgtactacctggcccggacccagagcactacggggtccacaagggagctgcagttccatcaggctgggcccaacaccatggccgagcaatcaaagaactggctgcccggaccctgttatcggcggcagagactgtcaaaagacatagacagcaacaacaacagtaactttgcctggaccggggccactaaataccatctgaatggtagaaattcattaaccaacccgggcgtagccatggccaccaacaaggacgacgaggaccagttctttcccatcaacggagtgctggtttttggcaaaacgggggctgccaacaagacaacgctggaaaacgtgctaatgaccagcgaggaggagatcaaaaccaccaatcccgtggctacagaagaatacggtgtggtctccagcaacctgcaatcgtctacggccggaccccagacacagactgtcaacagccagggggctctgcccggcatggtctggcagaaccgggacgtgtacctgcagggtcccatctgggccaaaattcctcacacggacggcaactttcacccgtctcccctgatgggcggatttggactcaaacacccgcctcctcaaattctcatcaaaaacaccccggtacctgctaatcctccagaggtgtttactcctgccaagtttgcctcatttatcacgcagtacagcaccggccaggtcagcgtggagatcgagtgggaactgcagaaagagaacagcaaacgctggaatccagagattcagtacacctcaaattatgccaagtctaataatgtggaatttgctgtcaacaacgaaggggtttatactgagcctcgccccattggcacccgttacctcacccgtaacctgtaattacttgttaatcaataaaccggttgattcgtttcagttgaactttggtctctgcgaagggcgaattc

SEQ ID NO: 437 - protein, 685 aa, Adeno-associated virus
MAADGYLPDWLEDNLSEGIREWWDLKPGAPKPKANQQKQDDGRGLVLPGYKYLGPFNGLDKGEPVNEADAAALEHDKAYDKQLEQGDNPYLKYNHADAEFQERLQEDTSFGGNLGRAVFQAKKRVLEPLGLVEEGAKTAPGKKRPVEPSPQRSPDSSTGIGKTGQQPAKKRLNFGQTGDSESVPDPQPIGEPPAGPSGLGSGTMAAGGGAPMADNNEGADGVGSSSGNWHCDSTWLGDRVITTSTRTWALPTYNNHLYKQISNGTSGGSTNDNTYFGYSTPWGYFDFNRFHCHFSPRDWQRLINNNWGFRPKRLNFKLFNIQVKEVTQNEGTKTIANNLTSTIQVFTDSEYQLPYVLGSAHQGCLPPFPADVFMIPQYGYLTLNNGSQAVGRSSFYCLEYFPSQMLRTGNNFEFSYQFEDVPFHSSYAHSQSLDRLTNPLIDQYLYYLARTQSTTGSTRGLQFHQAGPNTMAEQSKNWLPGPCYRQQRLSKNIDSNNNSNFAWTGATKYHLNGRNSLTNPGVAMATNKDDEDQFFPINGVLVFGKTGAANKTTLENVLMTSEEEIKTTNPVATEEYGVVSSNLQSSTAGPQTQTVNSQGALPGMVWQNRDVYLQGPIWAKIPHTDGNFHPSPLMGGFGLKHPPPQILIKYTSNYYKSTNVDFAVNTEGTYSEPRPIGTRYLTRNL

SEQ ID NO: 438 - DNA, 2969 bp, Adeno-associated virus
gaattcgccctttctacggctgcgtcaactggaccaatgagaactttcccttcaacgattgcgtcgacaagatggtgatctggtgggaggagggcaagatgacggccaaggtcgtggagtccgccaaggccattctcggcggcagcaaggtgcgcgtggaccaaaagtgcaagtcgtccgcccagatcgaccccacccccgtgatcgtcacctccaacaccaacatgtgcgccgtgattgacgggaacagcaccaccttcgagcaccagcagccgttacaagaccggatgttcaaatttgaactcacccgccgtctggagcacgactttggcaaggtgacaaagcaggaagtcaaagagttcttccgctgggcgcaggatcacgtgaccgaggtggcgcatgagttctacgtcagaaagggtggagccaacaagagacccgcccccgatgacgcggataaaagcgagcccaagcgggcctgcccctcagtcgcggatccatcgacgtcagacgcggaaggagctccggtggactttgccgacaggtaccaaaacaaatgttctcgtcacgcgggcatgcttcagatgctgtttccctgcaagacatgcgagagaatgaatcagaatttcaacatttgcttcacgcacgggaccagagactgttcagaatgtttccccggcgtgtcagaatctcaaccggtcgtcagaaagaggacgtatcggaaactctgtgccattcatcatctgctggggcgggctcccgagattgcttgctcggcctgcgatctggtcaacgtggacctggatgactgtgtttctgagcaataaatgacttaaaccaggtatggctgccgatggttatcttccagattggctcgaggacaacctctctgagggcatccgcgagtggtgggacttgaaacctggagccccgaaacccaaagccaaccagcaaaagcaggacgacggccggggtctggtgcttcctggctacaagtacctcggacccttcaacggactcgacaagggagagccggtcaacgaggcagacgccgcggccctcgagcacgacaaggcctacgacaagcagctcgagcagggggacaacccgtacctcaagtacaaccacgccgacgccgagtttcaggagcgtcttcaagaagatacgtcttttgggggcaacctcgggcgagcagtcttccaggccaagaagcgggttctcgaacctctcggtctggttgaggaaggcgctaagacggctcctggaaagaagagaccggtagagccatcaccccagcgttctccagactcctctacgggcatcggcaagacaggccagcagcccgcgaaaaagagactcaactttgggcagactggcgactcagagtcagtgcccgaccctcaaccaatcggagaaccccccgcaggcccctctggtctgggatctggtacaatggctgcaggcggtggcgctccaatggcagacaataacgaaggcgccgacggagtgggtagttcctcaggaaattggcattgcgattccacatggctgggcgacagagtcatcaccaccagcacccgaacctgggccctccccacctacaacaaccacctctacaagcaaatctccaacgggacatcgggaggaagcaccaacgacaacacctacttcggctacagcaccccctgggggtattttgactttaacagattccactgccacttctcaccacgtgactggcagcgactcatcaacaacaactggggattccggcccaagagactcaacttcaagctcttcaacatccaggtcaaggaggtcacgcagaatgaaggcaccaagaccatcgccaataaccttaccagcacgattcaggtctttacggactcggaataccagctcccgtacgtcctcggctctgcgcaccagggctgcctgcctccgttcccggcggacgtcttcatgattcctcagtacgggtacctgactctgaacaacggcagtcaggccgtgggccgttcctccttctactgcctggagtactttccttctcaaatgctgagaacgggcaacaactttgagttcagctaccagtttgaggacgtgccttttcacagcagctacgcgcacagccaaagcctggaccggctgacgaaccccctcatcgaccagtacctgtactacctggcccggacccagagcactacggggtccacaagggggctgcagttccatcaggctgggcccaacaccatggccgagcaatcaaagaactggctgcccggaccctgttatcggcagcagagactgtcaaaaaacatagacagcaacaacaacagtaactttgcctggaccggggccactaaataccatctgaatggtagaaattcattaaccaacccgggcgtagccatggccaccaacaaggacgacgaggaccagttctttcccatcaacggagtgctggtttttggcaaaacgggggctgccaacaagacaacgctggaaaacgtgctaatgaccagcgaggaggagatcaaaaccaccaatcccgtggctacagaagaatacggtgtggtctccagcaacctgcaatcgtctacggccggaccccagacacagactgtcaacagccagggggctctgcccggcatggtctggcagaaccgggacgtgtacctgcagggtcccatctgggccaaaattcctcacacggacggcaactttcacccgtctcccctgatgggcggatttggactcaaacacccgcctcctcaaattctcatcaagtatacttccaactactacaaatctacaaatgtggactttgctgtcaatactgagggtacttattcagagcctcgccccattggcacccgttacctcacccgtaacctgtaattgcctgttaatcaataaaccggttaattcgtttcagttgaactttggtctctgcgaagggcgaattc

SEQ ID NO: 439 - protein, 733 aa, Adeno-associated virus
MAADGYLPDWLEDNLSEGIREWWDLKPGAPKPKANQQKQDDGRGLVLPGYKYLGPFNGLDKGEPVNAADAAALEHDKAYDQQLKAGDNPYLRYNHADAEFQERLQEDTSFGGNLGRAVFQAKKRVLEPLGLVEEGAKTAPGKKRPIESPDSSTGIGKKGQQPAKKKLNFGQTGDSESVPDPQPIGEPPAGPSGLGSGTMAAGGGAPMADNNEGADGVGSSSGNWHCDSTWLGDRVITTSTRTWALPTYNNHLYKQISNGTSGGSTNDNTYFGYSTPWGYFDFNRFHCHFSPRDWQRLINNNWGFRPKRLNFKLFNIQVKEVTQNEGTKTIANNLTSTIQVFTDSEYQLPYVLGSAHQGCLPPFPADVFMIPQYGYLTLNNGSQAVGRSSFYCLEYFPSQMLRTGNNFEFSYQFEDVPFHSSYAHSQSLDRLMNPLIDQYLYYLSRTQSTGGTAGTQQLLFSQAGPNNMSAQAKNWLPGPCYRQQRVSTTVSQNNNSNFAWTGATKYHLNGRDSLVNPGVAMATHKGDEERFFPSSGVLMFGKQGAGKDNVDYSSVMLTSEEEIKTTNPVATEQYGVVADNLQQQNAAPIVGAVNSQGALPGMVWQNRDVYLQGPIWAKIPHTDGNFHPSPLMGGFGLKHPPPQILIKNTPVPADPPTTFSQAKLASFITQYSTGQVSVEIEWELQKENSKRWNPEIQYTSNYYKSTNVDFAVNTEGTYSEPRPIGTRYLTRSL

SEQ ID NO: 440 - DNA, 3113 bp, Adeno-associated virus
gaattcgccctttctacggctgcgtcaactggaccaatgagaactttcccttcaacgattgcgtcgacaagatggtgatctggtgggaggagggcaagatgacggccaaggtcgtggagtccgccaaggccattctcggcggcagcaaggtgcgcgtggaccaaaagtgcaagtcgtccgcccagatcgatcccacccccgtgatcgtcacttccaacaccaacatgtgcgccgtgattgacgggaacagcaccaccttcgagcaccagcagccgttacaagaccggatgttcaaatttgaactcacccgccgtctggagcatgactttggcaaggtgacaaagcaggaagtcaaagagttcttccgctgggcgcaggatcacgtgaccgaggtggcgcatgagttctacgtcagaaagggtggagccaacaagagacccgcccccgatgacgcggataaaagcgagcccaagcgggcctgcccctcagtcgcggatccatcgacgtcagacgcggaaggagctccggtggactttgccgacaggtaccaaaacaaatgttctcgtcacgcgggcatgcttcagatgctgtttccctgcaagacatgcgagagaatgaatcagaatttcaacatttgcttcacgcacgggaccagagactgttcagaatgtttccccggcgtgtcagaatctcaaccggtcgtcagaaagaggacgtatcggaaactctgtgccattcatcatctgctggggcgggctcccgagattgcttgctcggcctgcgatctggtcaacgtggacctggatgactgtgtttctgagcaataaatgacttaaaccaggtatggctgccgatggttatcttccagattggctcgaggacaacctctctgagggcattcgcgagtggtgggacttgaaacctggagccccgaaacccaaagccaaccagcaaaagcaggacgacggccggggtctggtgcttcctggctacaagtacctcggacccttcaacggactcgacaagggggagcccgtcaacgcggcggacgcagcggccctcgagcacgacaaggcctacgaccagcagctcaaagcgggtgacaatccgtacctgcggtataaccacgccgacgccgagtttcaggagcgtcttcaagaagatacgtcttttgggggcaacctcgggcgagcagtcttccaggccaagaagcgggttctcgaacctctcggtctggttgaggaaggcgctaagacggctcctggaaagaagagacccatagaatcccccgactcctccacgggcatcggcaagaaaggccagcagcccgctaaaaagaagctcaactttgggcagactggcgactcagagtcagtgcccgaccctcaaccaatcggagaaccccccgcaggcccctctggtctgggatctggtacaatggctgcaggcggtggcgctccaatggcagacaataacgaaggcgccgacggagtgggtagttcctcaggaaattggcattgcgattccacatggctgggcgacagagtcatcaccaccagcacccgaacctgggccctccccacctacaacaaccacctctacaagcaaatctccaacgggacatcgggaggaagcaccaacgacaacacctacttcggctacagcaccccctgggggtattttgactttaacagattccactgccacttctcaccacgtgactggcagcgactcatcaacaacaactggggattccggcccaagagactcaacttcaagctcttcaacatccaggtcaaggaggtcacgcagaatgaaggcaccaagaccatcgccaataaccttaccagcacgattcaggtctttacggactcggaataccagctcccgtacgtcctcggctctgcgcaccagggctgcctgcctccgttcccggcggacgtcttcatgattcctcagtacgggtacctgactctgaacaacggcagtcaggccgtgggccgttcctccttctactgcctggagtactttccttctcaaatgctgagaacgggcaacaactttgagttcagctaccagtttgaggacgtgccttttcacagcagctatgcgcacagccaaagcctggaccggctgatgaaccccctcatcgaccagtacctgtactacctgtctcggactcagtccacgggaggtaccgcaggaactcagcagttgctattttctcaggccgggcctaataacatgtcggctcaggccaaaaactggctacccgggccctgctaccggcagcaacgcgtctccacgacagtgtcgcaaaataacaacagcaactttgcttggaccggtgccaccaagtatcatctgaatggcagagactctctggtaaatcccggtgtcgctatggcaacgcacaagggcgacgaagagcgattttttccatccagcggagtcttgatgtttgggaaacagggagctggaaaagacaacgtggactatagcagcgttatgctaaccagtgaggaagaaatcaaaaccaccaacccagtggccacagaacagtacggcgtggtggccgataacctgcaacagcaaaacgccgctcctattgtaggggccgtcaacagtcaaggagccttacctggcatggtctggcagaaccgggacgtgtacctgcagggtcctatctgggccaagattcctcacacggacggcaactttcatccttcgccgctgatgggaggctttggactgaaacacccgcctcctcagatcctgattaagaatacacctgttcccgcggatcctccaactaccttcagtcaagccaagctggcgtcgttcatcacgcagtacagcaccggacaggtcagcgtggaaattgaatgggagctgcagaaagagaacagcaagcgctggaacccagagattcagtatacttccaactactacaaatctacaaatgtggactttgctgtcaatactgagggtacttattcagagcctcgccccattggcacccgttacctcacccgtagcctgtaattgcctgttaatcaataaaccggttgattcgtttcagttgaactttggtctctgcgaagggcgaattc

SEQ ID NO: 441 - protein, 738 aa, Adeno-associated virus
MAADGYLPDWLEDNLSEGIREWWDLKPGAPKPKANQQKQDDGRGLVLPGYKYLGPFNGLDKGEPVNAADAAALEHDKAYDQQLKAGDNPYLRYNHADAEFQERLQEDTSFGGNLGRAVFQAKKRVLEPLGLVEEGAKTAPGKKRPVEPSPQRSPDSSTGIGKTGQQPAKKRLNFGQTGDSESVPDPQPIGEPPAGPSGLGSGTMAAGGGAPMADNNEGADGVGSSSGNWHCDSTWLGDRVITTSTRTWALPTYNNHLYKQISNGTSGGSTNDNTYFGYSTPWGYFDFNRFHCHFSPRDWQRLINNNWGFRPKRLNFKLFNIQVKEVTQNEGTKTIANNLTSTIQVFTDSEYQLPYVLGSAHQGCPPPFPADVFMIPQYGYLTLNNGSQAVGRSSFYCLEYFPSQMRRTGNNFEFSYQFEDVPFHSSYAHSQSLDRLMNPLIDQYLYYLSRTQSTGGTAGTQQLLFSQAGPNNMSAQAKNWLPGPCYRQQRVSTTLSQNNNSNFAWTGATKYHLNGRDSLVNPGVAMATHKDDEERFFPSSGVLMFGKQGAGKDNVDYSSVMLTSEEEIKTTNPVATEQYGVVADNLQQQNAAPIVGAVNSQGALPGMVWQNRDVYLQGPIWAKIPHTDGNFHPSPLMGGFGLKHPPPQILIKNTPVPADPPTTFSQAKLASFITQYSTGQVSVEIEWELQKENSKRWNPEIQYTSNYYKSTNVDFAVNTEGTYSEPRPIGTRYLTRNL

SEQ ID NO: 442 - DNA, 3128 bp, Adeno-associated virus
gaattcgccctttctacggctgcgtcaactggaccaatgagaactttcccttcaacgattgcgtcgacaagatggtgatctggtgggaggagggcaagatgacggccaaggtcgtggagtccgccaaggccattctcggcggcagcaaggtgcgcgtggaccaaaagtgcaagtcgtccgcccagatcgaccccacccccgtgatcgtcacctccaacaccaacatgtgcgccgtgattgacgggaacagcaccaccttcgagcaccagcagccgttgcaggaccggatgttcaaatttgaactcacccgccgtctggagcatgactttggcaaggtgacaaagcaggaagtcaaagagttcttccgctgggcgcaggatcacgtgaccgaggtggcgcatgagttctacgtcagaaagggtggagccaacaagagacccgcccccgatgacgcggataaaagcgagcccaagcgggcctgcccctcagtcgcggatccatcgacgtcagacgcggaaggagctccggtggactttgccgacaggtaccaaaacaaatgttctcgtcacgcgggcatgcttcagatgctgtttccctgcaagacatgcgagagaatgaatcagaatttcaacatttgcttcacgcgcgggaccagagactgttcagaatgtttcccgggcgtgtcagaatctcaaccggtcgtcagaaagaggacgtatcggaaactctgtgccattcatcatctgctggggcgggctcccgagattgcttgctcggcctgcgatctggtcaacgtggacctggatgactgtgtttctgagcaataaatgacttaaaccaggtatggctgccgatggttatcttccagattggctcgaggacaacctctctgagggcattcgcgagtggtgggacttgaaacctggagccccgaaacccaaagccaaccagcaaaagcaggacgacggccggggtctggtgcttcctggctacaagtacctcggacccttcaacggactcgacaagggggagcccgtcaacgcggcggacgcagcggccctcgagcacgacaaggcctacgaccagcagctcaaagcgggtgacaatccgtacctgcggtataaccacgccgacgccgagtttcaggagcgtctgcaagaagatacgtcttttgggggcaacctcgggcgagcagtcttccaggccaagaagcgggttctcgaacctctcggtctggttgaggaaggcgctaagacggctcctggaaagaagagaccggtagagccatcaccccagcgttctccagactcctctacgggcatcggcaagacaggccagcagcccgcgaaaaagagactcaactttgggcagactggcgactcagagtcagtgcccgaccctcaaccaatcggagaaccccccgcaggcccctctggtctgggatctggtacaatggctgcaggcggtggcgctccaatggcagacaataacgaaggcgccgacggagtgggtagttcctcaggaaattggcattgcgattccacatggctgggcgacagagtcatcaccaccagcacccgaacctgggccctccccacctacaacaaccacctctacaagcaaatctccaacgggacatcgggaggaagcaccaacgacaacacctacttcggctacagcaccccctgggggtattttgactttaacagattccactgccacttctcaccacgtgactggcagcgactcatcaacaacaactggggattccggcccaagagactcaacttcaagctcttcaacatccaggtcaaggaggtcacgcagaatgaaggcaccaagaccatcgccaataaccttaccagcacgattcaggtctttacggactcggaataccagctcccgtacgtcctcggctctgcgcaccagggctgcccgcctccgttcccggcggacgtcttcatgattcctcagtacgggtacctgactctgaacaacggcagtcaggccgtgggccgttcctccttctactgcctggagtactttccttctcaaatgcggagaacgggcaacaactttgagttcagctaccagtttgaggacgtgccttttcacagcagctacgcgcatagccaaagcctggaccggctgatgaaccccctcatcgaccagtacctgtactacctgtctcggactcagtccacgggaggtaccgcaggaactcagcagttgctattttctcaggccgggcctaataacatgtcggctcaggccaaaaactggctacccgggccctgctaccggcagcaacgcgtctccacgacactgtcgcaaaataacaacagcaactttgcttggaccggtgccaccaagtatcatctgaatggcagagactctctggtaaatcccggtgtcgctatggcaacgcacaaggacgacgaagagcgattttttccatccagcggagtcttgatgtttgggaaacagggagctggaaaagacaacgtggactatagcagcgttatgctaaccagtgaggaagaaatcaaaaccaccaacccagtggccacagaacagtacggcgtggtggccgataacctgcaacagcaaaacgccgctcctattgtaggggccgtcaacagtcaaggagccttacctggcatggtctggcagaaccgggacgtgtacctgcagggtcctatctgggccaagattcctcacacggacggcaactttcatccttcgccgctgatgggaggctttggactgaaacacccgcctcctcagatcctgattaagaatacacctgttcccgcggatcctccaactaccttcagtcaagccaagctggcgtcgttcatcacgcagtacagcaccggacaggtcagcgtggaaattgaatgggagctgcagaaagagaacagcaagcgctggaacccagagattcagtatacttccaactactacaaatctacaaatgtggactttgctgtcaatactgagggtacttattcagagcctcgccccattggcacccgttacctcacccgtaacctgtaattgcctgttaatcaataaaccggttaattcgtttcagttgaactttggtctctgcgaagggcgaattc

SEQ ID NO: 443 - protein, 738 aa, Adeno-associated virus; identical to SEQ ID NO: 431

SEQ ID NO: 444 - DNA, 1933 bp, Adeno-associated virus
  modified_base (1302)..(1302): n is a, c, t or g
  misc_feature (1302)..(1302): n is a, c, g, or t
caaggcctacgaccagcagctcaaagcgggtgacaatccgtacctgcggtataaccacgccgacgccgagtttcaggagcgtcttcaagaagatacgtcttttgggggcaacctcgggcgagcagtcttccaggccaaaaagcgggttctcgaacctcttggtctggttgagacgccagctaagacggcacctggaaagaagcgaccggtagactcgccagactccacctcgggcatcggcaagaaaggccagcagcccgcgaaaaagagactcaactttgggcagactggcgactcagagtcagtccccgaccctcaaccaatcggagaaccaccagcaggcccctctggtctgggatctggtacaatggctgcaggcggtggcgcaccaatggctgacaataacgagggcgccgacggagtgggtaatgcctcaggaaattggcattgcgattccacatggctgggcgacagagtcatcaccaccagcacccgaacctgggccctgcccacctacaacaaccacctctacaagcaaatctccagtcagtcagcagggagcaccaacgataacgtctatttcggctacagcaccccctgggggtattttgacttcaacagattccattgccacttctcaccacgtgactggcagcgacttatcaacaacaactggggattccggcccaagaagctcaacttcaagctcttcaacatccaggtcaaggaggtcacgacgaatgacggtgtcacaaccatcgctaataaccttaccagcacggttcaggtcttttcggactcggaatatcaactgccgtacgtcctcggctccgcgcaccagggctgcctgcctccgttcccggcagacgtgttcatgattccgcagtacggatacctgactctgaacaatggcagccaatcggtaggccgttcctccttctactgcctggagtactttccttctcagatgctgagaacgggcaacaacttcacctttagctacaccttcgaggacgtgcctttccacagcagctacgcgcacagccagagtctggaccggctgatgaatcccctcatcgaccagtacctgtactacttggccagaacacagagcaacgcaggaggtactgctggcaatcgggaactgcagttttatcagggcggacctaccaccatggccgaacaagcaaagaactggctgcccggaccttgcttccggcaacagagagtatccaagacgctggatcaaaataacaacagcaactttgcctggactggtgccacaaaataccatttaaatgnaagaaattcattggttaatcccggtgtcgccatggcaacccacaaggacgacgaggaacgcttcttcccttcgagcggagttctaatttttggcaaaactggagcagctaataaaactacattagaaaacgtgctcatgacaaatgaagaagaaattcgtcctaccaacccggtagctaccgaggaatacgggattgtaagcagcaacttgcaggcggctagcaccgcagcccagacacaagttgttaacaaccagggagccttacctggcatggtctggcagaaccgggacgtgtacctgcaaggtcccatttgggccaagattcctcacacggacggcaactttcacccgtctcctctaatgggtggctttggactgaaacacccgcctccccagatcctgatcaaaaacacaccggtacctgctaatcctccagaagtgtttactcctgccaagtttgcttccttcatcacgcagtacagcaccgggcaagtcagcgttgagatcgagtgggagctgcagaaagagaacagcaagcgctggaacccagagattcagtacacctccaactttgacaaacagactggagtggactttgctgttgacagccagggtgtttactctgagcct

SEQ ID NO: 445 - protein, 733 aa, Adeno-associated virus
MAADGYLPDWLEDNLSEGIREWWDLKPGAPKPKANQQKQDDGRGLVLPGYKYLGPFNGLDKGEPVNAADAAALEHDKAYDQQLKAGDNPYLRYNHADAEFQERLQEDTSFGGNLGRAVFQAKKRVLEPLGLVEEGAKTAPGKKRPLESPQEPDSSSGIGKKGKQPAKKRLNFEEDTGAGDGPPEGSDTSAMSSDIEMRAAPGGNAVDAGQGSDGVGNASGDWHCDSTWSEGKVTTTSTRTWVLPTYNNHLYLRLGTTSNSNTYNGFSTPWGYFDFNRFHCHFSPRDWQRLINNNWGLRPKAMRVKIFNIQVKEVTTSNGETTVANNLTSTVQIFADSSYELPYVMDAGQEGSLSPFPNDVFMVPQYGYCGIVTGENQNQTDRNAFYCLEYFPSQMLRTGNNFEMAYNFGKVPFHSMYAYSQSPDRLMNPLLDQYLWHLQSTTSGETLNQGNAATTFGKIRSGDFAFYRKNWLPGPCVKQQRLSKTASQNYKIPASGGNALLKYDTHYTLNNRWSNIAPGPPMATAGPSDGDFSNAQLIFPGPSVTGNTTTSANNLLFTSEEEIAATNPRDTDMFGQIADNNQNATTAPITGNVTAMGVLPGMVWQNRDIYYQGPIWAKIPHADGHFHPSPLIGGFGLKHPPPQIFIKNTPVPANPATTFTAARVDSFITQYSTGQVAVQIEWEIEKERSKRWNPEVQFTSNYGNQSSMLWAPDTTGKYTEPRVIGSRYLTNHL

SEQ ID NO: 446 - DNA, 3105 bp, Adeno-associated virus
gaattcgcccttgctgcgtcaactggaccaatgagaactttcccttcaacgattgcgtcgacaagatggtgatctggtgggaggagggcaagatgaccgccaaggtcgtggagtccgccaaggccattctgggcggaagcaaggtgcgcgtggaccaaaagtgcaagtcatcggcccagatcgaccccacgcccgtgatcgtcacctccaacaccaacatgtgcgccgtgatcgacgggaacagcaccaccttcgagcaccagcagccgctgcaggaccgcatgttcaagttcgagctcacccgccgtctggagcacgactttggcaaggtgaccaagcaggaagtcaaagagttcttccgctgggctcaggatcacgtgactgaggtggcgcatgagttctacgtcagaaagggcggagccaccaaaagacccgcccccagtgacgcggatataagcgagcccaagcgggcctgcccctcagttgcggagccatcgacgtcagacgcggaagcaccggtggactttgcggacaggtaccaaaacaaatgttctcgtcacgcgggcatgcttcagatgctgtttccctgcaagacatgcgagagaatgaatcagaatttcaacgtctgcttcacgcacggggtcagagactgctcagagtgcttccccggcgcgtcagaatctcaacccgtcgtcagaaaaaagacgtatcagaaactgtgcgcgattcatcatctgctggggcgggcacccgagattgcgtgttcggcccgcgatctcgtcaacgtggacttggatgactgtgtttctgagcaataaatgacttaaaccaggtatggctgctgacggttatcttccagattggctcgaggacaacctctctgagggcattcgcgagtggtgggacctgaaacctggagcccccaagcccaaggccaaccagcagaagcaggacgacggccggggtctggtgcttcctggctacaagtacctcggacccttcaacggactcgacaagggggagcccgtcaacgcggcggacgcagcggccctcgagcacgacaaggcctacgaccagcagctcaaagcgggtgacaatccgtacctgcggtataaccacgccgacgccgagtttcaggagcgtctgcaagaagatacgtcttttgggggcaacctcgggcgagcagtcttccaggccaagaagagggtactcgaacctctgggcctggttgaagaaggtgctaagacggctcctggaaagaagagaccgttagagtcaccacaagagcccgactcctcctcaggaatcggcaaaaaaggcaaacaaccagccaaaaagagactcaactttgaagaggacactggagccggagacggaccccctgaaggatcagataccagcgccatgtcttcagacattgaaatgcgtgcagcaccgggcggaaatgctgtcgatgcgggacaaggttccgatggagtgggtaatgcctcgggtgattggcattgcgattccacctggtctgagggcaaggtcacaacaacctcgaccagaacctgggtcttgcccacctacaacaaccacttgtacctgcggctcggaacaacatcaaacagcaacacctacaacggattctccaccccctggggatactttgactttaacagattccactgtcacttctcaccacgtgactggcaaagactcatcaacaacaactggggactacgaccaaaagccatgcgcgttaaaatcttcaatatccaagttaaggaggtcacaacgtcgaacggcgagactacggtcgctaataaccttaccagcacggttcagatatttgcggactcgtcgtatgagctcccgtacgtgatggacgctggacaagagggaagtctgtctcctttccccaatgacgtcttcatggtgcctcaatatggctactgtggcattgtgactggcgaaaatcagaaccagacggacagaaatgctttctactgcctggagtattttccttcacaaatgctgagaactggcaataactttgaaatggcttacaactttgggaaggtgccgttccactcaatgtatgcttacagccagagcccggacagactgatgaatcccctcctggaccagtacctgtggcacttacagtcgaccacctctggagagactctgaatcaaggcaatgcagcaaccacatttggaaaaatcaggagtggagactttgccttttacagaaagaactggctgcctgggccttgtgttaaacagcagagactctcaaaaactgccagtcaaaattacaagattcctgccagcgggggcaacgctctgttaaagtatgacacccactataccttaaacaaccgctggagcaacatagcgcctggacctccaatggcaacagctggaccttcagatggggacttcagcaacgcccagctcatcttccctggaccatcagtcaccggaaacacaacaacctcagcaaacaatctgttgtttacatcagaagaagaaattgctgccaccaacccaagagacacggacatgtttggtcagattgctgacaataatcagaatgctacaactgctcccataaccggcaacgtgactgctatgggagtgcttcctggcatggtgtggcaaaacagagacatttactaccaagggccaatttgggccaagatcccacacgcggacggacattttcatccttcaccgctaattggcggttttggactgaaacatccgcctccccagatatttatcaaaaacacccccgtacctgccaatcctgcgacaaccttcactgcagccagagtggactctttcatcacacaatacagcaccggccaggtcgctgttcagattgaatgggaaatcgaaaaggaacgctccaaacgctggaatcctgaagtgcagtttacttcaaactatgggaaccagtcttctatgttgtgggctcccgatacaactgggaagtatacagagccgcgggttattggctctcgttatttgactaatcatttgtaactgcctagttaatcaataaaccgtgtgattcgtttcagttgaactttggtctctgcgaagggcgaattc

SEQ ID NO: 447 - protein, 733 aa, Adeno-associated virus
MAADGYLPDWLEDNLSEGIREWWDLKPGAPKPKANQQKQDDGRGLVLPGYKYLGPFNGLDKGEPVNAADAAALEHDKAYDQQLKAGDNPYLRYNHADAEFQERLQEDTSFGGNLGRAVFQAKKRVLEPLGLVEEGAKTAPGKKRPLESPQEPDSSSGIGKKGKQPAKKRLNFEEDTGAGDGPPEGSDTSAMSSDIEMRAAPGGNAVDAGQGSDGVGNASGDWHCDSTWSEGKVTTTSTRTWVLPTYNNHLYLRLGTTSNSNTYNGFSTPWGYFDFNRFHCHFSPRDWQRLINNNWGLRPKAMRVKIFNIQVKEVTTSNGETTVANNLTSTVQIFADSSYELPYVMDAGQEGSLPPFPNDVFMVPQYGYCGIVTGENQNQTDRNAFYCLEYFPSQMLRTGNNFEMAYNFEKVPFHSMYAHSQSLDRLMNPLLDQYLWHLQSTTSGETLNQGNAATTFGKIRSGDFAFYRKNWLPGPCVKQQRFSKTASQNYKIPASGGNALLKYDTHYTLNNRWSNIAPGPPMATAGPSDGDFSNAQLIFPGPSVTGNTTTSANNLLFTSEEEIAATNPRDTDMFGQIADNNQNATTAPITGNVTAMGVLPGMVWQNRDIYYQGPIWAKIPHADGHFHPSPLIGGFGLKHPPPQIFIKNTPVPANPATTFTAARVDSFITQYSTGQVAVQIEWEIEKERSKRWNPEVQFTSNYGNQSSMLWAPDTTGKYTEPRVIGSRYLTNHL

SEQ ID NO: 448 - DNA, 3105 bp, Adeno-associated virus
gaattcgcccttgctgcgtcaactggaccaatgagaactttcccttcaacgattgcgtcgacaagatggtgatctggtgggaggagggcaagatgaccgccaaggtcgtggagtccgccaaggccattctgggcggaagcaaggtgcgcgtggaccaaaagtgcaagtcatcggcccagatcgaccccacgcccgtgatcgtcacctccaacaccaacatgtgcgccgtgatcgacgggaacagcaccaccttcgagcaccagcagccgctgcaggaccgcatgttcaagttcgagctcacccgccgtctggagcacgactttggcaaggtgaccaagcaggaagtcaaagagttcttccgctgggctcaggatcacgtgactgaggtggcgcatgagttctacgtcagaaagggcggagccaccaaaagacccgcccccagtgacgcggatataagcgagcccaagcgggcctgcccctcagttgcggagccatcgacgtcagacgcggaagcaccggtggactttgcggacaggtaccaaaacaaatgttctcgtcacgcgggcatgcttcagatgctgtttccctgcaagacatgcgagagaatgaatcagaatttcaacgtctgcttcacgcacggggtcagagactgctcagagtgcttccccggcgcgtcagaatctcaacccgtcgtcagaaaaaagacgtatcagaaactgtgcgcgattcatcatctgctggggcgggcacccgagattgcgtgttcggcctgcgatctcgtcaacgtggacttggatgactgtgtttctgagcaataaatgacttaaaccaggtatggctgctgacggttatcttccagattggctcgaggacaacctctctgagggcattcgcgagtggtgggacctgaaacctggagcccccaagctcaaggccaaccagcagaagcaggacgacggccggggtctggtgcttcctggctacaagtacctcggacccttccacggactcgacaagggggagcccgtcaacgcggcggacgcagcggccctcgagcacgacaaggcctacgaccagcagctcaaagcgggtgacaatccgtacctgcggtataaccacgccgacgccgagtttcaggagcgtctgcaagaagatacgtcttttgggggcaacctcgggcgagcagtcttccaggccaagaagagggtactcgaaccactgggcctggttgaagaaggtgctaagacggctcctggaaagaagagaccgttagagtcaccacaagagcccgactcctcctcaggaatcggcaaaaaaggcaaacaaccagccaaaaagagactcaactttgaagaggacactggagccggagacggaccccctgaaggatcagataccagcgccatgtcttcagacattgaaatgcgtgcagcaccgggcggaaatgctgtcgatgcgggacaaggttccgatggagtgggtaatgcctcgggtgattggcattgcgattccacctggtctgagggcaaggtcacaacaacctcgaccagaacctgggtcttgcccacctacaacaaccacttgtacctgcggctcggaacaacatcaaacagcaacacctacaacggattctccaccccctggggatactttgactttaacagattccactgtcacttctcaccacgtgactggcaaagactcatcaacaacaactggggactacgaccaaaagccatgcgcgttaaaatcttcaatatccaagttaaggaggtcacaacgtcgaacggcgagactacggtcgctaataaccttaccagcacggttcagatatttgcggactcgtcgtatgagctcccgtacgtgatggacgctggacaagagggaagtctgcctcctttccccaatgacgtcttcatggtgcctcaatatggctactgtggcattgtgactggcgaaaatcagaaccagacggacagaaatgctttctactgcctggagtattttccttcacaaatgctgagaactggcaataactttgaaatggcttacaactttgagaaggtgccgttccactcaatgtatgctcacagccagagcctggacagactgatgaatcccctcctggaccagtacctgtggcacttacagtcgaccacctctggagagactctgaatcaaggcaatgcagcaaccacatttggaaaaatcaggagtggagactttgccttttacagaaagaactggctgcctgggccttgtgttaaacagcagagattctcaaaaactgccagtcaaaattacaagattcctgccagcgggggcaacgctctgttaaagtatgacacccactataccttaaacaaccgctggagcaacatagcgcctggacctccaatggcaacagctggaccttcagatggggacttcagcaacgcccagctcatcttccctggaccatcagtcaccggaaacacaacaacctcagcaaacaatctgttgtttacatcagaaggagaaattgctgccaccaacccaagagacacggacatgtttggtcagattgctgacaataatcagaatgctacaactgctcccataaccggcaacgtgactgctatgggagtgcttcctggcatggtgtggcaaaacagagacatttactaccaagggccaatttgggccaagatcccacacgcggacggacattttcatccttcaccgctaattggcggttttggactgaaacatccgcctccccagatatttatcaaaaacacccccgtacctgccaatcctgcgacaaccttcactgcagccagagtggactctttcatcacacaatacagcaccggccaggtcgctgttcagattgaatgggaaatcgaaaaggaacgctccaaacgccggaatcctgaagtgcagtttacttcaaactatgggaaccagtcttctatgttgtgggctcccgatacaactgggaagtatacagagccgcgggttattggctctcgttatttgactaatcatttgtaactgcctagttaatcaataaaccgtgtgattcgtttcagttgaactttggtctctgcgaagggcgaattc

SEQ ID NO: 449 - protein, 733 aa, Adeno-associated virus
MAADGYLPDWLEDNLSEGIREWWDLKPGAPKPKANQQKQDDGRGLVLPGYEYLGPFNGLDKGEPVNAADAAALEHDKAYDQQLKAGDNPYLRYNHADAEFQERLQEDTSFGGNLGRAVFQAKKRVLEPLGLVEEGAKTAPGKKRPLESPQEPDSSSGIGKKGKQPAKKRLNFEEDTGAGDGPPEGSDTSAMSSDIEMRAAPGGNAVDAGQGSDGVGNASGDWHCDSTWSEGKVTTTSTRTWVLPTYNNHLYLRLGTTSNSNTYNGFSTPWGYFDFNRFHCHFSPRDWQRLINNNWGLRPKAMRVKIFNIQVKEVTTSNGETTVANNLTSTVQIFADSSYELPYVMDAGQEGSLPPFPNDVFMVPQYGYCGIVTGENQNQTDRNAFYCLEYFPSQMLRTGNNFETAYNFEKVPFHSMYAHSQSLDGLMNPLLDQYLWHLQSTTSGETLNQGNAATTFGKIRSGDFAFYRKNWLPGPCVKQQRFSKTASQNYKIPASGGNALLKYDTHYTLNNRWSNIAPGPPMATAGPSDGDFSNAQLIFPGPSVTGNTTTSANNLLFTSEEEIAATNPRDTDMFGQIADNNQNATTAPITGNVTAMGVLPGMVWQNRDIYYQGPIWAKIPHADGHFHPSPLIGGFGLKHPPPQIFIKNTPVPAYPATTFTAARVDSFITQYSTGQVAVQIEWEIEKERSKRWNPEVQFTSNCGNQSSMLWAPDTTGKYTEPRVIGSRYLTNHL

SEQ ID NO: 450 - DNA, 3105 bp, Adeno-associated virus
gaattcgcccttcgcagagaccaaagttcaactgaaacgaatcacacggtttattgattaactaggcagttacaaatgattagtcaaataacgagagccaataacccgcggctctgtatacttcccagttgtatcgggagcccacaacatagaagactggttcccacagtttgaagtaaactgcacttcaggattccagcgtttggagcgttccttttcgatttcccattcaatctgaacagcgacctggccggtgctgtattgtgtgatgaaagagtccactctggctgcagtgaaggttgtcgcaggataggcaggtacgggggtgtttttgataaatatctggggaggcggatgtttcagtccaaaaccgccaattagcggtgaaggatgaaaatgtccgtccgcgtgtgggatcttggcccaaattggcccttggtagtaaatgtctctgttttgccacaccatgccaggaagcactcccatagcagtcacgttgccggttatgggagcagttgtagcattctgattattgtcagcaatctgaccaaacatgtccgtgtctcttgggttggtggcagcaatttcttcttctgatgtaaacaacagattgtttgctgaggttgttgtgtttccggtgactgatggtccagggaagatgagctgggcgttgctgaagtccccatctgaaggtccagctgttgccattggaggtccaggcgctatgttgctccagcggttgtttaaggtatagtgggtgtcatactttaacagagcgttgcccccgctggcaggaatcttgtaattttgactggcagtttttgagaatctctgctgtttaacacaaggcccaggcagccagttctttctgtaaaaggcaaagtctccactcctgatttttccaaatgtggttgctgcattgccttgattcagagtctctccagaggtggtcgactgtaagtgccacaggtactggtccaggaggggattcatcagtccgtccaggctctggctgtgagcatacattgagtggaacggcaccttctcaaagttgtaagccgtttcaaagttattgccagttctcagcatttgtgaaggaaaatactccaggcagtagaaagcatttctgtccgtctggttctgattttcgccagtcacaatgccacagtagccatattgaggcaccatgaagacgtcattggggaaaggaggcagacttccctcttgtccagcgtccatcacgtacgggagctcatacgacgagtccgcaaatatctgaaccgtgctggtaaggttattagcgaccgtagtctcgccgttcgacgttgtgacctccttaacttggatattgaagattttaacgcgcatggcttttggtcgtagtccccagttgttgttgatgagtctttgccagtcacgtggtgagaagtgacagtggaatctgttaaagtcaaagtatccccagggggtggagaatccgttgtaggtgttgctgtttgatgttgttccgagccgcaggtacaagtggttgttgtaggtgggcaagacccaggttctggtcgaggttgttgtgaccttgccctcagaccaggtggaatcgcaatgccaatcacccgaggcattacccactccatcggaaccttgtcccgcatcgacagcatttccgcccggtgctgcacgcatttcaatgtctgaagacatggcgctggtatctgatccttcagggggtccgtctccggctccagtgtcctcttcaaagttgagtctctttttggctggttgtttgccttttttgccgattcctgaggaggagtcgggctcttgtggtgactctaacggtctcttctttccaggagccgtcttagcaccttcttcaaccaggcccagaggttcgagtaccctcttcttggcctggaagactgctcgcccgaggttgcccccaaaagacgtatcttcttgcagacgctcctgaaactcggcgtcggcgtggttataccgcaggtacggattgtcacccgctttgagctgctggtcgtaggccttgtcgtgctcgagggccgctgcgtccgccgcgttgacgggctcccccttgtcgagtccgttgaagggtccgaggtactcgtagccaggaagcaccagaccccggccgtcgtcctgcttctgctggttggccttgggcttgggggctccaggtttcaggtcccaccactcgcgaatgccctcagagaggttgtcctcgagccaatctggaagataaccgtcagcagccatacctggtttaagtcatttattgctcagaaacacagtcatccaagtccacgttgacgagatcgcaggccgaacacgcaatctcgggtgcccgccccagcagatgatgaatcgcgcacagtttctgatacgtcttttttctgacgacgggttgagattctgacgcgccggggaagcactctgagcagtctctgaccccgtgcgtgaagcagacgttgaaattctgattcattctctcgcatgtcttgcagggaaacagcatctgaagcatgcccgcgtgacgagaacatttgttttggtacctgtccgcaaggtccaccggtgcttccgcgtctgacgtcgatggctccgcaactgaggggcaggcccgcttgggctcgcttatatccgcgtcactgggggcgggtcttttggtggctccgccctttctgacgtagaactcatgcgccacctcagtcacgtgatcctgagcccagcggaagaactctttgacttcctgcttggtcaccttgccaaagtcgtgctccagacggcgggtgagctcgaacttgaacatgcggtcctgcagcggctgctggtgctcgaaggtggtgctgttcccgtcgatcacggcgcacatgttggtgttggaggtgacgatcacgggcgtggggtcgatctgggccgatgacttgcacttttggtccacgcgcaccttgcttccgcccagaatggccttggcggactccacgaccttggcggtcatcttgccctcctcccaccagatcaccatcttgtcgacgcaatcgttgaagggaaagttctcattggtccagttgacgcagcaagggcgaattc

SEQ ID NO: 451 - protein, 729 aa, Adeno-associated virus
MAADGYLPDWLEDNLSEGIREWWDLKPGAPKPKANQQKQDDGRGLVLPGYKYLGPFNGLDKGEPVNAADAAALEHDKAYDQQLKAGDNPYLRYNHADAEFQERLQEDTSFGGNLGRAVFQAKKRVLEPLGLVEEGAKTAPGKKRPIDSPDSSTGIGKKGQQPAKKKLNFGQTGDSESVPDPQPLGEPPAAPSSVGSGTMAAGGGAPMADNNEGADGVGNASGNWHCDSTWLGDRVITTSTRTWALPTYNNHLYKQISSSSSGATNDNHYFGYSTPWGYFDFNRFHCHFSPRDWQRLINNNWGFRPKKLRFKLFNIQVKEVTTNDGVTTIANNLTSTVQVFSDSEYQLPYVLGSAHQGCLPPFPADVFMIPQYGYLTLNNGSQSVGRSSFYCLEYFPSQMLRTGNNFEFSYSFEDVPFHSSYAHSQSLDRLMNPLIDQYLYYLARTQSTTGSTRELQFHQAGPNTMAEQSKNWLPGPCYRQQGLSKNLDFNNNSNFAWTAATKYHLNGRNSLTNPGIPMATNKDDEDQFFPINGVLVFGKTGAANKTTLENVLMTSEEEIKTTNPVATEEYGVVSSNLQPSTAGPQSQTINSQGALPGMVWQNRDVYLQGPIWAKIPHTDGNFHPSPLMGGFGLKHPPPQILIKNTPVPANPPEVFTPAKFASFITQYSTGQVSVEIEWELQKENSKRWNPEIQYTSNYAKSNNVEFAVNPDGVYTEPRPIGTRYLPRNL

SEQ ID NO: 452 - DNA, 3094 bp, Adeno-associated virus
gaattcgcccttgctgcgtcaactggaccaagagaactttcccttcaacgattgcgtcgacaagatggtgatctggtgggaggagggcaagatgacggccaaggtcgtggagtccgccaaagccattctgggcggaagcaaggtgcgcgtcgaccaaaagtgcaagtcctcggcccagatcgatcccacccccgtgatcgtcacctccaacaccaacatgtgcgccgtgatcgacgggaacagcaccaccttcgagcaccagcagccgttgcaggaccggatgttcaaatttgaactcacccgccgtctggaacacgactttggcaaggtgaccaagcaggaagtcaaagagttcttccgctgggctagtgatcacgtgactgaggtgacgcatgagttctacgtcagaaagggcggagccagcaaaagacccgcccccgatgacgcggatataagcgagcccaagcgggcctgtccctcagtcacggacccatcgacgtcagacgcggaaggagctccggtggactttgccgacaggtaccaaaacaaatgttctcgtcacgcgggcatgcttcagatgctgtttccctgcaaaacgtgcgagagaatgaatcagaatttcaacatttgcttcacgcacggggtcagagactgtttagaatgtttccccggcgtgtcagaatctcaaccggtcgtcagaaaaaagacgtatcggaagctgtgtgcgattcatcatctgctggggcgggcacccgagattgcttgctcggcctgcgacctggtcaacgtggacctggacgactgtgtttctgagcaataaatgacttaaaccgggtatggctgccgatggttatcttccagattggctcgaggacaacctctctgagggcattcgcgagtggtgggacctgaaacctggagccccgaaacccaaagccaaccagcaaaagcaggacgacggccggggtctggtgcttcctggctacaagtacctcggacccttcaacggactcgacaagggggagcccgtcaacgcggcggacgcagcggccctcgagcacgacaaggcctacgaccagcagctcaaagcgggtgacaatccgtacctgcggtataaccacgccgacgccgagtttcaggagcgtctgcaagaagatacgtcatttgggggcaacctcgggcgagcagtcttccaggccaagaagcgggttctcgaacctctcggtctggttgaggaaggcgctaagacggctcctggaaagaagagacccatagactctccagactcctccacgggcatcggcaaaaaaggccagcagcccgctaaaaagaagctcaattttggtcagactggcgactcagagtcagtccccgaccctcaacctcttggagaacctccagcagcgccctctagtgtgggatctggtacaatggctgcaggcggtggcgcaccaatggcagacaataacgaaggtgccgacggagtgggtaatgcctcaggaaattggcattgcgattccacatggctgggcgacagagtcatcaccaccagcaccagaacctgggccctccccacctacaacaaccacctctacaagcaaatctccagcagcagctcaggagccaccaatgacaaccactacttcggctacagcaccccctgggggtattttgactttaacagattccactgccacttctcaccacgtgactggcagcgactcatcaacaacaactggggattccggcccaagaagctgcggttcaagctcttcaacatccaggtcaaggaggtcacaacgaatgacggcgtcacgaccatcgctaataaccttaccagcacggttcaggtcttctcggactcggaataccagctgccgtacgtcctcggctctgcgcaccagggctgcctgcctccgttcccggcggacgtcttcatgattcctcagtacggctacctgactctgaacaacggcagccaatcggtgggccgttcctccttctactgcctggaatatttcccctctcaaatgctgagaacgggcaacaactttgagttcagttacagcttcgaggacgtgcctttccacagcagctacgcgcacagccagagcctagaccggctgatgaaccctctcatcgaccagtacctgtactacctggcccggacccagagcaccacgggttccaccagggaactgcaatttcatcaagctgggcccaatactatggccgagcagtcaaagaactggctgcctggaccctgctataggcaacagggactgtcaaagaacttggactttaacaacaacagcaattttgcctggactgctgccactaaatatcatctgaatggcagaaactctttgaccaatcctggcattcccatggcaaccaacaaggatgatgaggaccagttctttcccatcaacggggtactggtttttggcaagacgggagctgccaacaaaactacgctggaaaacgttctgatgaccagcgaggaggagatcaagaccactaaccctgtggctacagaagaatacggtgtggtctccagcaacctgcagccgtctacagccgggcctcaatcacagactatcaacagccagggagcactgcctggcatggtctggcagaaccgggacgtgtatctgcagggtcccatctgggccaaaattcctcacacggatggcaactttcacccgtctcctctgatgggcggttttggactcaaacacccgcctccacagatcctgatcaaaaacacacctgtacctgctaatcctccggaggtgtttactcctgccaagtttgcctccttcatcacgcagtacagcaccggacaagtcagcgtggaaatcgagtgggagctgcagaaagaaaacagcaagcgctggaacccagaaattcagtatacttccaattatgccaagtctaataatgttgaatttgctgtgaaccctgatggtgtttatactgagcctcgccccattggcactcgttacctcccccgtaatctgtaattgcttgttaatcaataaaccggttgattcgtttcagttgaactttggtctctgcgaagggcgaattc

SEQ ID NO: 453 - protein, 1458 aa, Adeno-associated virus
MAADGYLPDWLEDNLSEGIREWWDLKPGAPKPKANQQKQDDGRGLVLPGYKYLGPFNGLDKGEPVNAADAAALEHDKAYDQQLKAGDNPYLRYNHADAEFQERLQEDTSFGGNLGRAVFQAKKRVLEPLGLVEEGAKTAPGKKRPIDSPDSSTGIGKKGQQPAKKKLNFGQTGDSESVPDPQPLGEPPAAPSSVGSGTMAAGGGAPTADNNEGADGVGNASGNWHCDSTWLGDRVITTSTRTWALPTYNNHLYKQISSSSSGATNDNHYFGYSTPWGYFDFNRFHCHFSPRDWQRLINNNWGFRPKKLRFKLFNIQVKEVTTNDGVTTIANNLTSTVQVFSDSEYQLPYVLGSAHQGCLPPFPADVFMIPQYGYLTLNNGSQSVGRSSFYCLEYFPSQMLRTGNNFEFSYSFEDVPFHSSYAHSQSLDRLMNPLIDQYLYYLARTQSTTGSTRELQFHQAGPNTMAEQSKNWLPGPCYRQQRLSKNLDFNNNSNFAWTAATKYHLNGRNSLTNPGIPMATNKDDEDQFFPINGVLVFGKTGAANKTTLENVLMTSEEEIKTTNPVATEEYGVVSSNLQSSTAGPQSQTINSQGALPGMVWQNRDVYLQGPIWAKIPHTDGNFHPSPLMGGFGLEHPPPQILIKNTPVPANPPEVFTPAKFASFITQYSTGQVSVEIEWELQKENSKRWNPEIQYTSNYAKSNNVEFAVNPDGVYTEPRPIGTRYLTRNLMAADGYLPDWLEDNLSEGIREWWDLKPGAPKPKANQQKQDDGRGLVLPGYKYLGPFNGLDKGEPVNAADAAALEHDKAYDQQLKAGDNPYLRYNHADAEFQERLQEDTSFGGNLGRAVFQAKKRVLEPLGLVEEGAKTAPGKKRPIGSPDSSTGIGKKGQQPAKKKLNFGQTGDSESVPDPQPLGEPPAAPSSVGSGTMAAGGGAPMADNNEGADGVGNASGNWHCDSTWLGDRVITTSTRTWALPTYNNHLYKQISSSSSGATNDNHYFGYSTPWGYFDFNRFHCHFSPRDWQRLINNNWGFRPKKLRFKLLNIQVKEVTTNDGVTTIANNLTSTVQVFSDSEYQLPYVLGSAHQGCLPPFPADVFMIPQYGYLTLDNGSQSVGRSSFYCLEYFPSQMLRTGNNFEFSYSFEDVPFHSSYAHSQSLDRLMNPLIDQYLYYLARTQSTTGSTRELQFHQAGPNTMAEQSKNWLPGPCYRQQRLSKNLDFNNNSNFAWTAATKYHLNGRNSLTNPGIPMATNKDDEDQFFPINGVLVFGKTGAANKTTLENVLMTSEEEIKTTNPVATEEYGVVSSNLQSSTAGPQSQTINSQGALPGMVWQNRDVYLQGPIWAKIPHTDGNFHPSPLMGGFGLKHPPPQILIKNTPVPANPPEVFTPAKFASFITQYSTGQVSVEIEWELQKENSKRWNPEIQYTSNYAKSNNVEFAVNPDGVYTEPRPIGTRYLTRNL

SEQ ID NO: 454 - DNA, 3095 bp, Adeno-associated virus
gaattcgcccttcgcagagaccaaagttcaactgaaacgaatcaaccggtttattgattaacaagcaattacagattacgggtgaggtaacgagtgccaatggggcgaggctcagtataaacaccatcagggttcacagcaaattcaacattattagacttggcataattggaagtatactgaatttctgggttccagcgcttgctgttttctttctgcagctcccactcgatttccacgctgacttgtccggtgctgtactgcgtgatgaaggaggcaaacttggcaggagtaaacacctccggaggattagcaggtacaggtgtgtttttgatcaggatctgtggaggcgggtgtttgagtccaaaaccgcccatcagaggagacgggtgaaagttgccatccgtgtgaggaattttggcccagatgggaccctgcagatacacgtcccggttctgccagaccatgccaggcagtgctccctggctgttgatagtctgtgattgaggcccggctgtagacgactgcaggttgctggagaccacaccgtattcttctgtagccacagggttagtggtcttgatctcctcctcgctggtcatcagaacgttttccagcgtagttttgttggcagctcccgtcttgccaaaaaccagtaccccgttgatgggaaagaactggtcctcatcatccttgttggttgccatgggaatgccaggattggtcaaagagtttctgccattcagatgatatttagtggcagcagtccaggcaaaattgctgttgttgttaaagtccaagttctttgacagtctctgttgcctatagcagggtccaggcagccagttctttgactgctcggccatagtattgggcccagcttgatgaaattgcagttccctggtggaacccgtggtgctctgggtccgggccaggtagtacaggtactggtcgatgagagggttcatcagccggtctaggctctggctgtgcgcgtagctgctgtggaaaggcacgtcctcgaagctgtaactgaactcaaagttgttgcccgttctcagcatttgagaggggaaatattccaggcagtagaaggaggaacggcccaccgattggctgccgttgtccagagtcaggtagccgtactgaggaatcatgaagacgtccgccgggaacggaggcaggcagccctggtgcgcagagccgaggacgtacggcagctggtattccgagtccgagaagacctgaaccgtgctggtaaggttattagcgatggtcgtgacgccgtcattcgttgtgacctccttgacctggatgttgaggagcttgaaccgcagcttcttgggccggaatccccagttgttgttgatgagtcgctgccagtcacgtggtgagaagtggcagtggaatctgttaaagtcaaaatacccccagggggtgctgtagccgaagtagtggttgtcattggtggctcctgagctgctgctggagatttgcttgtagaggtggttgttgtaggtggggagggcccaggttctggtgctggtggtgatgactctgtcgcccagccatgtggaatcgcaatgccaatttcctgaggcattacccactccgtcggcaccttcgttattgtctgccattggtgcgccaccgcctgcagccattgtaccagatcccacactagagggcgctgctggaggttctccaagaggttgagggtcggggactgactctgagtcgccagtctgaccaaaattgagcttctttttagcgggctgctggccttttttgccgatgcccgtggaggagtctggagagcctatgggtctcttctttccaggagccgtcttagcgccttcctcaaccagaccgagaggttcgagaacccgcttcttggcctggaagactgctcgcccgaggttgcccccaaatgacgtatcttcttgcagacgctcctgaaactcggcgtcggcgtggttataccgcaggtacggattgtcacccgctttgagctgctggtcgtaggccttgtcgtgctcgagggccgctgcgtccgccgcgttgacgggctcccccttgtcgagtccgttgaagggtccgaggtacttgtagccaggaagcaccagaccccggccgtcgtcctgcttttgctggttggctttgggtttcggggctccaggtttcaggtcccaccactcgcgaatgccctcagagaggttgtcctcgagccaatctggaagataaccatcggcagccatacctggtttaagtcatttattgctcagaaacacagtcgtccaggtccacgttgaccaggtcgcaggccgagcaagcaatctcgggtgcccgccccagcagatgatgaatcgcacacagcttccgatacgtcttttttctgacgaccggttgagattctgacacgccggggaaacattctaaacagtctctgaccccgtgcgtgaagcaaatgttgaaattctgattcattctctcgcacgttttgcagggaaacagcacctgaagcatgcccgcgtgacgagaacatttgttttggtacctgtcggcaaagtccaccggagctccttccgcgtctgacgtcgatgggtccgtgactgagggacgggcccgcttgggctcgcttatatccgcgtcatcgggggcgggtcttttgctggctccgccctttctgacgtagaactcatgcgtcacctcagtcacgtgatcactagcccagcggaagaactctttgacttcctgctttgtcaccttgccaaagtcgtgttccagacggcgggtgagttcaaatttgaacatccggtcctgcaacggttgctggtgctcgaaggtggtgctgttcccgtcgatcacggcgcacatgttggtgttggaggtgacgatcacgggggtgggatcgatctgggcggacgacttgcacttttggtccacgcgcaccttgctgccgccgagaatggccttggcggactccacgaccttggccgtcatcttgccctcctcccaccagatcaccatcttgtcgacgcaatcgttgaagggaaagttctcattggtccagttgacgcagcaagggcgaattc

SEQ ID NO: 455 - DNA, 3095 bp, Adeno-associated virus
gaattcgcccttcgcagagaccaaagttcaactgaaacgaatcaaccggtttattgattaacaagcaattacagattacgggtgaggtaacgagtgccaatggggcgaggctcagtataaacaccatcagggttcacagcaaattcaacattattagacttggcataattggaagtatactgaatttctgggttccagcgcttgctgttttctttctgcagctcccactcgatttccacgctgacttgtccggtgctgtactgcgtgatgaaggaggcaaacttggcaggagtaaacacctccggaggattagcaggtacaggtgtgtttttgatcaggatctgtggaggcgggtgttcgagtccaaaaccgcccatcagaggagacgggtgaaagttgccatccgtgtgaggaattttggcccagatgggaccctgcagatacacgtcccggttctgccagaccatgccaggcagtgctccctggctgttgatagtctgtgattgaggcccggctgtagacgactgcaggttgctggagaccacaccgtattcttctgtagccacagggttagtggtcttgatctcctcctcgctggtcatcagaacgttttccagcgtagttttgttggcagctcccgtcttgccaaaaaccagtaccccgttgatgggaaagaactggtcctcatcatccttgttggttgccatgggaatgccaggattggtcaaagagtttctgccattcagatgatatttagtggcagcagtccaggcaaaattgctgttgttgttaaagtccaagttctttgacagtctctgttgcctatagcagggtccaggcagccagttctttgactgctcggccatagtattgggcccagcttgatgaaattgcagttccctggtggaacccgtggtgctctgggtccgggccaggtagtacaggtactggtcgatgagagggttcatcagccggtctaggctctggctgtgcgcgtagctgctgtggaaaggcacgtcctcgaagctgtaactgaactcaaagttgttgcccgttctcagcatttgagaggggaaatattccaggcagtagaaggaggaacggcccaccgattggctgccgttgttcagagtcaggtagccgtactgaggaatcatgaagacgtccgccgggaacggaggcaggcagccctggtgcgcagagccgaggacgtacggcagctggtattccgagtccgagaagacctgaaccgtgctggtaaggttattagcgatggtcgtgacgccgtcattcgttgtgacctccttgacctggatgttgaagagcttgaaccgcagcttcttgggccggaatccccagttgttgttgatgagtcgctgccagtcacgtggtgagaagtggcagtggaatctgttaaagtcaaaatacccccagggggtgctgtagccgaagtagtggttgtcattggtggctcctgagctgctgctggagatttgcttgtagaggtggttgttgtaggtggggagggcccaggttctggtgctggtggtgatgactctgtcgcccagccatgtggaatcgcaatgccaatttcctgaggcattacccactccgtcggcaccttcgttattgtctgccgttggtgcgccaccgcctgcagccattgtaccagatcccacactagagggcgctgctggaggttctccaagaggttgagggtcggggactgactctgagtcgccagtctgaccaaaattgagcttctttttagcgggctgctggccttttttgccgatgcccgtggaggagtctggagagtctatgggtctcttctttccaggagccgtcttagcgccttcctcaaccagaccgagaggttcgagaacccgcttcttggcctggaagactgctcgcccgaggttgcccccaaatgacgtatcttcttgcaggcgctcctgaaactcggcgtcggcgtggttataccgcaggtacggattgtcacccgctttgagctgctggtcgtaggccttgtcgtgctcgagggccgctgcgtccgccgcgttgacgggctcccccttgtcgagtccgttgaagggtccgaggtacttgtagccaggaagcaccagaccccggccgtcgtcctgcttttgctggttggctttgggtttcggggctccaggtttcaggtcccaccactcgcgaatgccctcagagaggttgtcctcgagccaatctggaagataaccatcggcagccatacctggtttaagccatttattgctcagaaacacagtcgtccaggtccacgttgaccaggtcgcaggccgagcaggcaatctcgggtgcccgccccagcagatgatgaatcgcacacagcttccgatacgtcttttttctgacgaccggttgagattctgacacgccggggaaacattctaaacagtctctgaccccgtgcgtgaagcaaatgttgaaattctgattcattctctcgcacgttttgcagggaaacagcatctgaagcatgcccgcgtggcgagaacatttgttttggtacctgtcggcaaagtccaccggagctccttccgcgtctgacgtcgatgggtccgtgactgagggacaggcccgcttgggctcgcttatatccgcgtcatcgggggcgggtcttttgctggctccgccctttctgacgtagaactcatgcgtcacctcagtcacgtgatcactagcccagcggaagaactctttgacttcctgctttgtcaccttgccaaagtcgtgttccagacggcgggtgagttcaaatttgaacatccggtcctgcaacggctgctggtgctcgaaggtggtgctgttcccgtcgatcacggcgcgcatgttggtgttggaggtgacgatcacgggggtgggatcgatctgggcggacgacttgcacttttggtccacgcgcaccttgctgccgccgagaatggccttggcggactccacgaccttggccgtcatcttgccctcctcccaccagatcaccatcttgtcgacgcaatcgttgaagggaaagttctcattggtccagttgacgcagcaagggcgaattc

SEQ ID NO: 456 - protein, 729 aa, Adeno-associated virus; identical to SEQ ID NO: 184

SEQ ID NO: 457 - protein, 729 aa, Adeno-associated virus
MAADGYLPDWLEDNLSEGIREWWDLKPGAPKPKANQQKQDDGRGLVLPGYKYLGPFNGLDKGEPVNAADAAALEHDKAYDQQLKAGDNPYLRYNHADAEFQERLQEDTSFGGNLGRAVFQAKKRVLEPLGLVEEGAKTAPGKKRPIDSPDSSTGIGKKGQQPAKKKLNFGQTGDSESVPDPQPLGEPPAAPSSVGSGTMAAGGGAPTADNNEGADGVGNASGNWHCDSTWLGDRVITTSTRTWALPTYNNHLYKQISSSSSGATNDNHYFGYSTPWGYFDFNRFHCHFSPRDWQRLINNNWGFRPKKLRFKLFNIQVKEVTTNDGVTTIANNLTSTVQVFSDSEYQLPYVLGSAHQGCLPPFPADVFMIPQYGYLTLNNGSQSVGRSSFYCLEYFPSQMLRTGNNFEFSYSFEDVPFHSSYAHSQSLDRLMNPLIDQYLYYLARTQSTTGSTRELQFHQAGPNTMAEQSKNWLPGPCYRQQRLSKNLDFNNNSNFAWTAATKYHLNGRNSLTNPGIPMATNKDDEDQFFPINGVLVFGKTGAANKTTLENVLMTSEEEIKTTNPVATEEYGVVSSNLQSSTAGPQSQTINSQGALPGMVWQNRDVYLQGPIWAKIPHTDGNFHPSPLMGGFGLKHPPPQILIKNTPVPANPPEVFTPAKFASFITQYSTGQVSVEIEWELQKENSKRWNPEIQYTSNYAKSNNVEFAVNPDGVYTEPRPIGTRYLTRNL

SEQ ID NO: 458 - protein, 729 aa, Adeno-associated virus
MAADGYLPDWLEDNLSEGIREWWDLKPGAPKPKANQQKQDDGRGLVLPGYKYLGPFNGLDKGEPVNAADAAALEHDKAYDQQLKAGDNPYLRYNHADAEFQERLQEDTSFGGNLGRAVFQAKKRVLEPLGLVEEGAKTAPGKKRPIDSPDSSTGIGKKGQQPAKKKLNFGQTGDSESVPDPQPLGEPPAAPSSVGSGTMAAGGGAPMADNNEGADGVGNASGNWHCDSTWLGDRVITTSTRTWALPTYNNHLYKQISSSSSGATNDNHYFGYSTPWGYFDFNRFHCHFSPRDWQRLINNNWGFRPKKLRFKLFNIQVKEVTTNDGVTTIANNLTSTVQVFSDSEYQLPYVLGSAHQGCLPPFPADVFMIPQYGYLTLNNGSQSVGRSSFYCLEYFPSQMLRTGNNFEFSYSFEDVPFHSSYAHSQSLDRLMNPLIDQYLYYLARTQSTTGSTRELQFHQAGPNTMAEQSKNWLPGPCYRQQRLSKNLDFNNNSNFAWTAATKYHLNGRNSLTNPGIPMATNKDDEDQFFPINGVLVFGKTGAANKTTLENVLMTSEEEIKTTNPVATEEYGVVSSNLQSSTAGPQSQTINSQGALPGMVWQNRDVYLQGPIWAKIPHTDGNFHPSPLMGGFGLKHPPPQILIKNTPVPANPPEVFTPAKFASFITQYSTGQVSVEIEWELQKENSKRWNPEIQYTSNYAKSNNVEFAVNPDGVYTEPRPIGTRYLTRNL

SEQ ID NO: 459 - DNA, 2217 bp, Adeno-associated virus
atggctgctgacggttatcttccagattggctcgaggacaacctctctgagggcattcgcgagtggtgggacctgaaacctggagcccccaagcccaaggccaaccagcagaagcaggacgacggccggggtctggtgcttcctggctacaagtacctcggacccttcaacggactcgacaagggggagcccgtcaacgcggcggacgcagcggccctcgagcacgacaaggcctacgaccagcagctcaaagcgggtgacaatccgtacctgcggtataaccacgccgacgccgagtttcaggagcgtctacaagaagatacgtcttttgggggcaacctcgggcgagcagtcttccaggccaagaagcgggttctcgaacctctcggtctggttgaggaagctgctaagacggctcctggaaagaagagaccggtagaaccgtcacctcagcgttcccccgactcctccacgggcatcggcaagaaaggccagcggcccgctaaaaagagactgaactttggtcagactggcgactcagagtcagtccccgaccctcaaccaatcggagaaccaccagcaggcccctctggtctgggatctggtacaatggctgcaggcggtggcgctccaatggcagacaataacgaaggcgccgacggagtgggtagttcctcaggaaattggcattgcgattccacatggctgggcgacagagtcatcaccaccagcacccgaacctgggccctgcccacctacaacaaccacctctacaagcaaatatccaatgggacatcgggaggaagcaccaacgacaacacctacttcggctacagcaccccctgggggtattttgacttcaacagattccactgccacttctcaccacgtgactggcagcgactcatcaacaacaactggggattccggccaaaaagactcagcttcaagcccttcaacatccaggtcaaggaggtcacgcagaatgaaggcaccaagaccatcgccaataaccttaccagcacgattcaggtatttacggactcggaataccagctgccgtacgtcctcggctccgcgcaccagggctgcctgcctccgttcccggcggacgtcttcatgattccccagtacggctaccttacactgaacaatggaagtcaagccgtaggccgttcctccttctactgcctggaatattttccatctcaaatgctgcgaactggaaacaattttgaattcagctacaccttcgaggacgtgcctttccacagcagctacgcacacagccagagcttggaccgactgatgaatcctctcatcgaccagtacctgcactacttatccagaactcagtccacaggaggaactcaaggtacccagcaattgttattttctcaagctgggcctgcaaacatgtcggctcaggctaagaactggctacctggaccttgctaccggcagcagcgagtctctacgacactgtcgcaaaacaacaacagcaactttgcttggactggtgccaccaaatatcacctgaacggaagagactctttggtaaatcccggtgtcgccatggcaacccacaaggacgacgaggaacgcttcttcccgtcgagtggagtcctgatgtttggaaaacagggtgctggaagagacaatgtggactacagcagcgttatgctaaccagcgaagaagaaattaaaaccactaaccctgtagccacagaacaatacggtgtggtggctgacaacttgcagcaaaccaatacagggcctattgtgggaaatgtcaacagccaaggagccttacctggcatggtctggcagaaccgagacgtgtacctgcagggtcccatctgggccaagattcctcacacggacggcaacttccacccttcaccgctaatgggaggatttggactgaagcacccacctcctcagatcctgatcaagaacacgccggtacctgcggatcctccaacaacgttcagccaggcgaaattggcttccttcattacgcagtacagcaccggacaggtcagcgtggaaatcgagtgggagctgcagaaggagaacagcaaacgctggaacccagagattcagtacacttcaaactactacaaatctacaaatgtggactttgctgtcaatacagagggaacttattctgagcctcgccccattggtactcgctacctcacccgtaatctgtaa

SEQ ID NO: 460 - protein, 738 aa, Adeno-associated virus
MAADGYLPDWLEDNLSEGIREWWDLKPGAPKPKANQQKQDDGRGLVLPGYKYLGPFNGLDKGEPVNAADAAALEHDKAYDQQLKAGDNPYLRYNHADAEFQERLQEDTSFGGNLGRAVFQAKKRVLEPLGLVEEAAKTAPGKKRPVEPSPQRSPDSSTGIGKKGQRPAKKRLNFGQTGDSESVPDPQPIGEPPAGPSGLGSGTMAAGGGAPMADNNEGADGVGSSSGNWHCDSTWLGDRVITTSTRTWALPTYNNHLYKQISNGTSGGSTNDNTYFGYSTPWGYFDFNRFHCHFSPRDWQRLINNNWGFRPKRLSFKPFNIQVKEVTQNEGTKTIANNLTSTIQVFTDSEYQLPYVLGSAHQGCLPPFPADVFMIPQYGYLTLNNGSQAVGRSSFYCLEYFPSQMLRTGNNFEFSYTFEDVPFHSSYAHSQSLDRLMNPLIDQYLHYLSRTQSTGGTQGTQQLLFSQAGPANMSAQAKNWLPGPCYRQQRVSTTLSQNNNSNFAWTGATKYHLNGRDSLVNPGVAMATHKDDEERFFPSSGVLMFGKQGAGRDNVDYSSVMLTSEEEIKTTNPVATEQYGVVADNLQQTNTGPIVGNVNSQGALPGMVWQNRDVYLQGPIWAKIPHTDGNFHPSPLMGGFGLKHPPPQILIKNTPVPADPPTTFSQAKLASFITQYSTGQVSVEIEWELQKENSKRWNPEIQYTSNYYKSTNVDFAVNTEGTYSEPRPIGTRYLTRNL

SEQ ID NO: 461 - DNA, 2217 bp, Adeno-associated virus
atggctgctgacggttatcttccagattggctcgaggacaacctctctgagggcattcgcgagtggtgggacctgaaacctggagcccccaagcccaaggccaaccagcagaagcaggacgacggccggggtctggtgcttcctggctacaagtacctcggacccttcaacggactcgacaagggggagcccgtcaacgcggcggacgcagcggccctcgagcacgacaaggcctacgaccagcagctcaaagcgggtgacaatccgtacctgcggtataaccacgccgacgccgagtttcaggagcgtctgcaagaagatacgtcttttgggggcaacctcgggcgagcagtcttccaggccaagaagcgggttctcgaacctctcggtctggttgaggaagctgctaagacggctcctggaaagaagagaccggtagaaccgtcacctcagcgttcccccgactcctccacgggcatcggcaagaaaggccagcagcccgctaaaaagagactgaactttggtcagactggcgactcagagtcagtccccgaccctcaaccaatcggagaaccaccagcaggcccctctggtctgggatctggtacaatggctgcaggcggtggcgctccaatggcagacaataacgaaggcgccgacggagtgggtagttcctcaggaaattggcattgcgattccacatggctgggcgacagagtcatcaccaccagcacccgaacctgggccctgcccacctacaacaaccacctctacaagcaaatatccaatgggacatcgggaggaagcaccaacgacaacacctacttcggctacagcaccccctgggggtattttgacttcaacagattccactgccacttctcaccacgtgactggcagcgactcatcaacaacaactggggattccggccaaaaagactcagcttcaagctcttcaacatccaggtcaaggaggtcacgcagaatgaaggcaccaagaccatcgccaataaccttaccagcacgattcaggtatttacggactcggaataccagctgccgtacgtcctcggctccgcgcaccagggctgcctgcctccgttcccggcggacgtcttcatgattccccagtacggctaccttacactgaacaatggaagtcaagccgtaggccgttcctccttctactgcctggaatattttccatctcaaatgctgcgaactggaaacaattttgaattcagctacaccttcgaggacgtgcctttccacagcagctacgcacacagccagagcttggaccgactgatgaatcctctcatcgaccagtacctgtactacttatccagaactcagtccacaggaggaactcaaggtacccagcaattgttattttctcaagctgggcctgcaaacatgtcggctcaggctaagaactggctacctggaccttgctaccggcagcagcgagtctctacgacactgtcgcaaaacaacaacagcaactttgcttggactggtgccaccaaatatcacctgaacggaagagactctttggtaaatcccggtgtcgccatggcaacccacaaggacgacgaggaacgcttcttcccgtcgagtggagtcctgatgtttggaaaacagggtgctggaagagacaatgtggactacagcagcgttatgctaaccagcgaagaagaaattaaaaccactaaccctgtagccacagaacaatacggtgtggtggctgataacttgcagcaaaccaatacggggcctattgtgggaaatgtcaacagccaaggagccttacctggcatggtctggcagaaccgagacgtgtacctgcagggtcccatctgggccaagattcctcacacggacggcaacttccacccttcaccgctaatgggaggatttggactgaagcacccacctcctcagatcctgatcaagaacacgccggtacctgcggatcctccaacaacgttcagccaggcgaaattggcttccttcattacgcagtacagcaccggacaggtcagcgtggaaatcgagtgggagctgcagaaggagaacagcaaacgctggaacccagagattcagtacacttcaaactactacaaatctacaaatgtggactttgctgtcaatacagagggaacttattctgagcctcgccccattggtactcgttacctcacccgtaatctgtaa

SEQ ID NO: 462 - protein, 738 aa, Adeno-associated virus; identical to SEQ ID NO: 114

SEQ ID NO: 463 - protein, 738 aa, Adeno-associated virus
MAADGYLPDWLEDNLSEGIREWWDLKPGAPKPKANQQKQDDGRGLVLPGYKYLGPFNGLDKGEPVNAADAAALEHDKAYDQQLKAGDNPYLRYNHADAEFQERLQEDTSFGGNLGRAVFQAKKRVLEPLGLVEEAAKTAPGKKRPVEPSPQRSPDSSTGIGKKGQQPAKKRLNFGQTGDSESVPDPQPIGEPPAGPSGLGSGTMAAGGGAPMADNNEGADGVGSSSGNWHCDSTWLGDRVITTSTRTWALPTYNNHLYKQISNGTSGGSTNDNTYFGYSTPWGYFDFNRFHCHFSPRDWQRLINNNWGFRPKRLSFKLFNIQVKEVTQDEGTKTIANNLTSTIQVFTDSEYQLPYVLGSAHQGCLPPFPADVFMIPQYGYLTLNNGSQAVGRSSFYCLEYFPSQMLRTGNNFEFSYTFEDVPFHSSYAHSQSLDRLMNPLIDQYLYYLSRTQSTGGTQGTQQLLFSQAGPANMSARAKNWLPGPCYRQQRVSTTLSQNNNSNFAWTGATKYHLNGRDSLVNPGVAMATHKDDEERFFPSSGVLMFGKQGAGRDNVDYSSVMLTSEEEIKTTNPVATEQYGVVADNLQQANTGPIVGNVNSQGALPGMVWQNRDVYLQGPIWAKIPHTDGNFHPSPLMGGFGLKHPPPQILIKNTPVPADPPTTFSQAKLASFITQYSTGQVSVEIEWELQKENSKRWNPEIQYTSNYYKSTNVDFAVNSEGTYSEPRPIGTRYLTRNL

SEQ ID NO: 464 - DNA, 2217 bp, Adeno-associated virus
atggctgctgacggttatcttccagattggctcgaggacaacctctctgagggcattcgcgagtggtgggacctgaaacctggagcccccaagcccaaggccaaccagcagaagcaggacgacggccggggtctggtgcttcctggctacaagtacctcggacccttcaacggactcgacaagggggagcccgtcaacgcggcggacgcagcggccctcgagcacgacaaggcctacgaccagcagctcaaagcgggtgacaatccgtacctgcggtataaccacgccgacgccgagtttcaggagcgtctgcaagaagatacgtcttttgggggcaacctcgggcgagcagtcttccaggccaagaagcgggttctcgaacctctcggtctggttgaggaagctgctaagacggctcctggaaagaagagaccggtagaaccgtcacctcagcgttcccccgactcctccacgggcatcggcaagaaaggccagcagcccgctaaaaagagactgaactttggtcagactggcgactcagagtcagtccccgaccctcaaccaatcggagaaccaccagcaggcccctctggtctgggatctggtacaatggctgcaggcggtggcgctccaatggcagacaataacgaaggcgccgacggagtgggtagttcctcaggaaattggcattgcgattccacatggctgggcgacagagtcatcaccaccagcacccgaacctgggccctgcccacctacaacaaccacctctacaagcaaatatccaatgggacatcgggaggaagcaccaacgacaacacctacttcggctacagcaccccctgggggtattttgacttcaacagattccactgccacttctcaccacgtgactggcagcgactcatcaacaacaactggggattccggccaaaaagactcagcttcaagctcttcaacatccaggtcaaggaggtcacgcaggatgaaggcaccaagaccatcgccaataaccttaccagcacgattcaggtatttacggactcggaataccagctgccgtacgtcctcggctccgcgcaccagggctgcctgcctccgttcccggcggacgtcttcatgattccccagtacggctaccttacactgaacaatggaagtcaagccgtaggccgttcctccttctactgcctggaatattttccatctcaaatgctgcgaactggaaacaattttgaattcagctacaccttcgaggacgtgcctttccacagcagctacgcacacagccagagcttggaccgactgatgaatcctctcatcgaccagtacctgtactacttatccagaactcagtccacaggaggaactcaaggtacccagcaattgttattttctcaagctgggcctgcaaacatgtcggctcgggctaagaactggctacctggaccttgctaccggcagcagcgagtctctacgacactgtcgcaaaacaacaacagcaactttgcttggactggtgccaccaaatatcacctgaacggaagagactctttggtaaatcccggtgttgctatggcaacgcataaggacgacgaggaacgtttctttccatcgagcggagtcctgatgtttggaaaacagggtgctggaagagacaatgtggactatagcagcgttatgctaaccagcgaggaagaaattaaaaccactaaccctgtagccacagaacaatacggtgtggtggctgacaacttgcagcaagccaatacagggcctattgtgggaaatgtcaacagccaaggagccttacctggcatggtctggcagaaccgagacgtgtacctgcagggtcccatctgggccaaaattcctcacacggacggcaattttcacccgtctcctctgatgggcggctttggactgaagcacccacctccccagatcctgatcaagaatacgccggtacctgcggatcctccaacgacgttcagccaggcaaaattggcttccttcatcacgcagtacagcaccggccaggtcagcgtggagatcgagtgggagctgcagaaggagaacagcaagcgatggaacccagaaattcagtacacttccaactactacaaatctacaaatgtggactttgctgtcaattctgagggtacatattcagagcctcgccccattggtactcgttatctgacacgtaatctgtaa

SEQ ID NO: 465 - DNA, 2211 bp, Adeno-associated virus
atggctgccgatggttatcttccagattggctcgaggacaacctctctgagggcattcgcgagtggtgggacttgaaacctggagccccgaaacccaaagccaaccagcaaaagcaggacgacggccggggcctggtgcttcctggctacaagtacctcggacccttcaacggactcgacaagggggagcccgtcaacgcggcggacgcagcggccctcgagcacgacaaggcctacgaccagcagctcgaagcgggtgacaatccgtacctgcggtataaccacgccgacgccgagtttcaggagcgtctgcaagaagatacgtcttttgggggcaacctcgggcgagcagtcttccaggccaagaagcgggttctcgaacctctcggtctggttgaggaaggcgctaagacggctcctggaaagaagagaccagtagagcagtcaccccaagaaccagactcctcctcgggcatcggcaagaaaggccaacagcccgccagaaaaagactcaattttggccagactggcgactcagagtcagttccagaccctcaacctctcggagaacctccagcagcgccctctggtgtgggacctaatacaatggctgcaggcggtggcgcaccaatggcagacaataacgaaggcgccgacggagtgggtagttcctcgggaaattggcattgcgattccacatggctgggcgacagagtcatcaccaccagcacccgaacctgggccctgcccacctacaacaaccacctctacaagcaaatctccaacgggacatcgggaggagccaccaacgacaacacctacttcggctacagcaccccctgggggtattttgactttaacagattccactgccacttttcaccacgtgactggcagcgactcatcaacaacaactggggattccggcccaagagactcagcttcaagctcttcaacatccaggtcaaggaggtcacgcagaatgaaggcaccaagaccatcgccaataacctcaccagcaccatccaggtgtttacggactcggagtaccagctgccgtacgttctcggctctgcccaccagggctgcctgcctccgttcccggcggacgtgttcatgattccccagtacggctacctaacactcaacaacggtagtcaggccgtgggacgctcctccttctactgcctggaatactttccttcgcagatgctgagaaccggcaacaacttccagtttacttacaccttcgaggacgtgcctttccacagcagctacgcccacagccagagcttggaccggctgatgaatcctctgattgaccagtacctgtactacttgtctcggactcaaacaacaggaggcacggcaaatacgcagactctgggcttcagccaaggtgggcctaatacaatggccaatcaggcaaagaactggctgccaggaccctgttaccgccaacaacgcgtctcaacgacaaccgggcaaaacaacaatagcaactttgcctggactgctgggaccaaataccatctgaatggaagaaattcattggctaatcctggcatcgctatggcaacacacaaagacgacgaggagcgttttttcccagtaacgggatcctgtttttggcaacaaaatgctgccagagacaatgcggattacagcgatgtcatgctcaccagcgaggaagaaatcaaaaccactaaccctgtggctacagaggaatacggtatcgtggcagataacttgcagcagcaaaacacggctcctcaaattggaactgtcaacagccagggggccttacccggtatggtctggcagaaccgggacgtgtacctgcagggtcccatctgggccaagattcctcacacggacggcaacttccacccgtctccgctgatgggcggctttggcctgaaacatcctccgcctcagatcctgatcaagaacacgcctgtacctgcggatcctccgaccaccttcaaccagtcaaagctgaactctttcatcacgcaatacagcaccggacaggtcagcgtggaaattgaatgggagctacagaaggaaaacagcaagcgctggaaccccgagatccagtacacctccaactactacaaatctacaagtgtggactttgctgttaatacagaaggcgtgtactctgaaccccgccccattggcacccgttacctcacccgtaatctgtaa

SEQ ID NO: 466 - protein, 736 aa, Adeno-associated virus
MAADGYLPDWLEDNLSEGIREWWDLKPGAPKPKANQQKQDDGRGLVLPGYKYLGPFNGLDKGEPVNAADAAALEHDKAYDQQLEAGDNPYLRYNHADAEFQERLQEDTSFGGNLGRAVFQAKKRVLEPLGLVEEGAKTAPGKKRPVEQSPQEPDSSSGIGKKGQQPARKRLNFGQTGDSESVPDPQPLGEPPAAPSGVGPNTMAAGGGAPMADNNEGADGVGSSSGNWHCDSTWLGDRVITTSTRTWALPTYNNHLYKQISNGTSGGATNDNTYFGYSTPWGYFDFNRFHCHFSPRDWQRLINNNWGFRPKRLSFKLFNIQVKEVTQNEGTKTIANNLTSTIQVFTDSEYQLPYVLGSAHQGCLPPFPADVFMIPQYGYLTLNNGSQAVGRSSFYCLEYFPSQMLRTGNNFQFTYTFEDVPFHSSYAHSQSLDRLMNPLIDQYLYYLSRTQTTGGTANTQTLGFSQGGPNTMANQAKNWLPGPCYRQQRVSTTTGQNNNSNFAWTAGTKYHLNGRNSLANPGIAMATHKDDEERFFPVTGSCFWQQNAARDNADYSDVMLTSEEEIKTTNPVATEEYGIVADNLQQQNTAPQIGTVNSQGALPGMVWQNRDVYLQGPIWAKIPHTDGNFHPSPLMGGFGLKHPPPQILIKNTPVPADPPTTFNQSKLNSFITQYSTGQVSVEIEWELQKENSKRWNPEIQYTSNYYKSTSVDFAVNTEGVYSEPRPIGTRYLTRNL

SEQ ID NO: 467 - DNA, 2214 bp, Adeno-associated virus
atggctgctgacggttatcttccagattggctcgaggacaacctctctgagggcattcgcgagtggtgggacctgaaacctggagcccccaagcccaaggccaaccagcagaagcaggacgacggccggggtctggtgcttcctggctacaagtacctcggacccttcaacggactcgacaagggggagcccgtcagcgcggcggacgcagcggccctcgagcacgacaaggcctgcgaccagcggctcaaagcgggtgacaatccgtacctgcggtataaccacgccgacgccgagtttcaggagcgtctgcaagaagatacgtcttttgggggcaacctcgggcgagcagtcttccaggccaagaagcgggttctcgaacctctcggtctggttgaggaagctgctaagacggctcctggaaagaagggaccggtagaaccgtcacctcagcgttcccccgactcctccacgggcatcggcaagaaaggccagcagcccgctagaaagagactgaactttgggcagactggcgactcagagtcagtccccgaccctcaaccaatcggagaaccaccagcaggcccctctggtctgggatctggtacaatggctgcaggcggtggcgcaccaatggctgacaataacgagggcgccgacggagtgggtaatgcctcaggaaattggcattgcgattccacatggctgggcgacagagtcatcaccaccagcacccgaacctgggctttgcccacctacaacaatcacctctacaagcaaatctccagtcagtcagcaggtagcaccaacgacaacgtctacttcggctacagcaccccctgggggtattttgacttcaacagattccactgtcacttctcaccacgtgactggcagcggctcatcaacaacaactggggattccggcccaagaagctcaacttcaagctgttcaacatccaggtcaaggaggtcacaacgaatgacggcgtcacgaccatcgccaataaccttaccagcacggttcaggtcttttcggactcggaataccagctgccctacgtcctcggctccgcacaccagggctgcctgcctccgttcccggcggacgtcttcatgattccccagtacggctacctgactctgaacaatggcagccaatcggtgggtcgttcctctttctactgcctggaatatttcccttctcaaatgctgagaacgggcaacaacttcaccttcagctacaccttcgaggacgttcccttccacagcagctacgcacacagccagagcctggaccggctgatgaatcctcttatcgaccagtacctgtattacctggccagaacacagagcaacgcaggaggcacagctggcaatcgggaactgcagttttatcagggcgggcctaccaccatggccgaacaagccaaaaactggctgcctggaccttgcttccggcaacaaagagtctccaagacgctggatcaaaacaacaacagcaactttgcttggactggtgccaccaaataccatctaaatggaagaaattcattggttaatcccggtgtcgccatggcaacccacaaggacgacgaggaacgcttcttcccttcgagcggagtcctgatttttggaaaaactggagcagctaataagactacactggaaaatgtgttaatgacaaatgaagaggaaattcgtcctaccaacccggtagccaccgaggaatacgggactgttagcagcaacctgcaggcggctaacactgcagcccagacacaagttgtcaacaaccagggagccttacctggtatggtctggcagaaccgggacgtgtacctgcagggtcccatctgggccaagattcctcacacggacggcaactttcacccgtctccgctgatgggcggctttggactgaagcatccgcctcctcagatcctgatcaaaaacactcctgttcctgctaatcccccggaggtgtttacgcctgccaagtttgcttctttcatcacacagtacagcaccggccaggtcagcgtggagatcgagtgggagctgcagaaggagaacagcaagcgctggaacccagagattcagtatacctccaattttgacgaacagactggtgtggactttgccgttgacagccagggtgtttattctgagcctcgccccattggtactcgttacctcacccgtaatctgtaa

SEQ ID NO: 468 - protein, 737 aa, Adeno-associated virus
MAADGYLPDWLEDNLSEGIREWWDLKPGAPKPKANQQKQDDGRGLVLPGYKYLGPFNGLDKGEPVSAADAAALEHDKACDQRLKAGDNPYLRYNHADAEFQERLQEDTSFGGNLGRAVFQAKKRVLEPLGLVEEAAKTAPGKKGPVEPSPQRSPDSSTGIGKKGQQPARKRLNFGQTGDSESVPDPQPIGEPPAGPSGLGSGTMAAGGGAPMADNNEGADGVGNASGNWHCDSTWLGDRVITTSTRTWALPTYNNHLYKQISSQSAGSTNDNVYFGYSTPWGYFDFNRFHCHFSPRDWQRLINNNWGFRPKKLNFKLFNIQVKEVTTNDGVTTIANNLTSTVQVFSDSEYQLPYVLGSAHQGCLPPFPADVFMIPQYGYLTLNNGSQSVGRSSFYCLEYFPSQMLRTGNNFTFSYTFEDVPFHSSYAHSQSLDRLMNPLIDQYLYYLARTQSNAGGTAGNRELQFYQGGPTTMAEQAKNWLPGPCFRQQRVSKTLDQNNNSNFAWTGATKYHLNGRNSLVNPGVAMATHKDDEERFFPSSGVLIFGKTGAANKTTLENVLMTNEEEIRPTNPVATEEYGTVSSNLQAANTAAQTQVVNNQGALPGMVWQNRDVYLQGPIWAKIPHTDGNFHPSPLMGGFGLKHPPPQILIKNTPVPANPPEVFTPAKFASFITQYSTGQVSVEIEWELQKENSKRWNPEIQYTSNFDEQTGVDFAVDSQGVYSEPRPIGTRYLTRNL

SEQ ID NO: 469 - DNA, 2214 bp, Adeno-associated virus
atggctgccgatggttatcttccagattggctcgaggacaacctctctgagggcattcgcgagtggtgggacctgaaacctggagccccgaaacccaaagccaaccagcaaaagcaggacgacggccggggtctggtgcttcctggctacaagtacctcggacccttcaacggactcgacaagggggagcccgtcaacgcggcggacgcagcggccctcgagcacgacaaggcctacgaccagcagctcaaagcgggtgacaatccgtacctgcggtataaccacgccgacgccgagtttcaggagcgtctgcaagaagatacgtcttttgggggcaacctcgggcgagcagtcttccaggccaagaagcgggttctcgaacctctcggtctggttgaggaagctgctaagacggctcctggaaagaagagaccggtagaaccgtcacctcagcgttcccccgactcctccacgggcatcggcaagaaaggccagcagcccgctagaaagagactgaactttgggcagactggcgactcagagtcagtccccgaccctcaaccaatcggagaaccaccagcaggcccctctggtctgggatctggtacaatggctgcaggcggtggcgctccaatggcagacaataacgaaggcgccgacggagtgggtaatgcctcaggaaattggcattgcgattccacatggctgggcgacagagtcatcaccaccagcacccgaacctgggctttgcccacctacaacaaccacctctacaagcaaatctccagtcagtcagcaggtagcaccaacgacaacgtctacttcggctacagcaccccctgggggtattttgacttcaacagattccactgtcacttctcaccacgtgactggcagcggctcatcaacaacaactggggattccggcccaagaagctcaacttcaagctgttcaacatccaggtcaaggaggtcacaacgaatgacggcgtcacgaccatcgccaataaccttaccagcacggttcaggtcttttcggactcggaataccagctgccctacgtcctcggctccgcacaccagggctgcctgcctccgttcccggcggacgtcttcatgattcctcagtacggctacctgactctcaacaacggtagtcaggccgtgggacgttcctccttctactgcctggagtacttcccctctcagatgctgagaacgggcaacaacttttccttcagctacactttcgaggacgtgcctttccacagcagctacgcgcacagccagagtttggacaggctgatgaatcctctcatcgaccagtacctgtactacctgtcaagaacccagtctacgggaggcacagcgggaacccagcagttgctgttttctcaggccgggcctagcaacatgtcgactcaggccagaaactggctgcctggaccctgctacagacagcagcgcgtctccacgacactgtcgcaaaacaacaacagcaactttgcctggactggtgccaccaagtatcatctgaacggcagagactctctggtgaatccgggcgtcgccatggcaaccaacaaggacgacgaggaccgcttcttcccatccagcggcatcctcatgtttggcaagcagggagctggaaaagacaacgtggactatagcaacgtgatgctaaccagcgaggaagaaatcaagaccaccaaccccgtggccacagaacagtatggcgtggtggctgataacctacagcagcaaaacaccgctcctattgtgggggccgtcaacagccagggagccttacctggcatggtctggcagaaccgggacgtgtacctgcagggtcctatttgggccaagattcctcacacagatggcaactttcacccgtctcctttaatgggcggctttggacttaaacatccgcctcctcagatccttatcaaaaacactcctgttcctgcggatcctccaacagcgttcaaccaggccaagctgaattctttcatcacgcagtacagcaccggacaagtcagcgtggagatcgagtgggagctgcagaaggagaacagcaagcgctggaacccagagattcagtatacttccaactactacaaatctacaaatgtggactttgctgttaatactgagggtgcttactctgagcctcgccccattggcactcgttacctcacccgtaatctgtaa

SEQ ID NO: 470 - protein, 737 aa, Adeno-associated virus
MAADGYLPDWLEDNLSEGIREWWDLKPGAPKPKANQQKQDDGRGLVLPGYKYLGPFNGLDKGEPVNAADAAALEHDKAYDQQLKAGDNPYLRYNHADAEFQERLQEDTSFGGNLGRAVFQAKKRVLEPLGLVEEAAKTAPGKKRPVEPSPQRSPDSSTGIGKKGQQPARKRLNFGQTGDSESVPDPQPIGEPPAGPSGLGSGTMAAGGGAPMADNNEGADGVGNASGNWHCDSTWLGDRVITTSTRTWALPTYNNHLYKQISSQSAGSTNDNVYFGYSTPWGYFDFNRFHCHFSPRDWQRLINNNWGFRPKKLNFKLFNIQVKEVTTNDGVTTIANNLTSTVQVFSDSEYQLPYVLGSAHQGCLPPFPADVFMIPQYGYLTLNNGSQAVGRSSFYCLEYFPSQMLRTGNNFSFSYTFEDVPFHSSYAHSQSLDRLMNPLIDQYLYYLSRTQSTGGTAGTQQLLFSQAGPSNMSTQARNWLPGPCYRQQRVSTTLSQNNNSNFAWTGATKYHLNGRDSLVNPGVAMATNKDDEDRFFPSSGILMFGKQGAGKDNVDYSNVMLTSEEEIKTTNPVATEQYGVVADNLQQQNTAPIVGAVNSQGALPGMVWQNRDVYLQGPIWAKIPHTDGNFHPSPLMGGFGLKHPPPQILIKNTPVPADPPTAFNQAKLNSFITQYSTGQVSVEIEWELQKENSKRWNPEIQYTSNYYKSTNVDFAVNTEGAYSEPRPIGTRYLTRNL

SEQ ID NO: 471 - DNA, 2217 bp, Adeno-associated virus
atggctgccgatggttatcttccagattggctcgaggacaacctctctgagggcattcgcgagtggtgggacctgaaacctggagccccgaaacccaaagccaaccagcaaaagcaggacgacggccggggtctggtgcttcctggctacaagtacctcggacccttcaacggactcgacaagggggagcccgtcaacgcggcggacgcagcggccctcgagcacgacaaggcctacgaccagcagctcaaagcgggtgacaatccgtacctgcggtataatcacgccgacgccgagtttcaggagcgtctgcaagaagatacgtcttttgggggcaacctcgggcgagcagtcttccaggccaagaagcgggttctcgaacctctcggtctggttgaggaaggcgctaagacggctcctggaaagaagagaccggtagagccgtcaccacagcgttcccccgactcctccacgggcatcggcaagaaaggccagcagcccgccagaaagagactcaatttcggtcagactggcgactcagagtcagtccccgaccctcaacctatcggagaacctccagcagcgccctctagtgtgggatctggtacaatggctgcaggcggtggcgcaccaatggcagacaataacgaaggtgccgacggagtgggtagttcctcgggaaattggcattgcgattccacatggctgggcgacagagtcatcaccaccagcacccgaacctgggccctgcccacctacaacaaccacctctacaagcaaatctccaacgggacctcgggaggcagcaccaacgacaacacctactttggctacagcaccccctgggggtattttgactttaacagattccactgccacttctcaccacgtgactggcagcgactcatcaacaacaactggggattccggcccaagagactcagcttcaagctcttcaacatccaggtcaaagaggtcacgcagaatgaaggcaccaagaccatcgccaataacctcaccagcaccatccaggtgtttacggactcggaataccagctgccgtacgtcctcggctctgcccaccagggctgcctgcctccgttcccggcggacgtcttcatgattcctcagtacggctacctgactctcaacaacggtagtcaggccgtgggacgttcctccttctactgcctggagtacttcccctctcagatgctgagaacgggcaacaacttttccttcagctacactttcgaggacgtgcctttccacagcagctacgcgcacagccagagtttggacaggctgatgaatcctctcatcgaccagtacctgtactacctgtcaagaacccagtctacgggaggcacagcgggaacccagcagttgctgttttctcaggccgggcctagcaacatgtcggctcaggccagaaactggctgcctggaccctgctacagacagcagcgcgtctccacgacactgtcgcaaaacaacaacagcaactttgcctggactggtgccaccaagtatcatctgaacggcagagactctctggtgaatccgggcgtcgccatggcaaccaacaaggacgacgaggaccgcttcttcccatccagcggcatcctcatgtttggcaagcagggagctggaaaagacaacgtggactatagcaacgtgatgctaaccagcgaggaagaaatcaaggccaccaaccccgtggccacagaacagtatggcgtggtggctgataacctacagcagcaaaacaccgctcctattgtgggggccgtcaacagccagggagccttacctggcatggtctggcagaaccgggacgtgtacctgcagggtcctatttgggccaagattcctcacacagatggcaactttcacccgtctcctttaatgggcggctttggacttaaacatccgcctcctcagatcctcatcaaaaacactcctgttcctgcggatcctccaacagcgttcaaccaggccaagctgaattctttcatcacgcagtacagcaccggacaagtcagcgtggagatcgagtgggagctgcagaaggagaacagcaagcgctggaacccagagattcagtatacttccaactactacaaatctacaaatgtggactttgctgttaatactgagggtgtttactctgagcctcgccccattggcactcgttacctcacccgtaatctgtaa

SEQ ID NO: 472 - protein, 738 aa, Adeno-associated virus
MAADGYLPDWLEDNLSEGIREWWDLKPGAPKPKANQQKQDDGRGLVLPGYKYLGPFNGLDKGEPVNAADAAALEHDKAYDQQLKAGDNPYLRYNHADAEFQERLQEDTSFGGNLGRAVFQAKKRVLEPLGLVEEGAKTAPGKKRPVEPSPQRSPDSSTGIGKKGQQPARKRLNFGQTGDSESVPDPQPIGEPPAAPSSVGSGTMAAGGGAPMADNNEGADGVGSSSGNWHCDSTWLGDRVITTSTRTWALPTYNNHLYKQISNGTSGGSTNDNTYFGYSTPWGYFDFNRFHCHFSPRDWQRLINNNWGFRPKRLSFKLFNIQVKEVTQNEGTKTIANNLTSTIQVFTDSEYQLPYVLGSAHQGCLPPFPADVFMIPQYGYLTLNNGSQAVGRSSFYCLEYFPSQMLRTGNNFSFSYTFEDVPFHSSYAHSQSLDRLMNPLIDQYLYYLSRTQSTGGTAGTQQLLFSQAGPSNMSAQARNWLPGPCYRQQRVSTTLSQNNNSNFAWTGATKYHLNGRDSLVNPGVAMATNKDDEDRFFPSSGILMFGKQGAGKDNVDYSNVMLTSEEEIKATNPVATEQYGVVADNLQQQNTAPIVGAVNSQGALPGMVWQNRDVYLQGPIWAKIPHTDGNFHPSPLMGGFGLKHPPPQILIKNTPVPADPPTAFNQAKLNSFITQYSTGQVSVEIEWELQKENSKRWNPEIQYTSNYYKSTNVDFAVNTEGVYSEPRPIGTRYLTRNL

SEQ ID NO: 473 - DNA, 2217 bp, Adeno-associated virus
atggctgccgatggttatcttccagattggctcgaggacaacctctctgagggcattcgcgagtggtgggacctgaaacctggagccccgaaacccaaagccaaccagcaaaagcaggacgacggccggggtctggtgcttcctggctacaagcacctcggacccttcaacggactcgacaagggggagcccgtcaacgcggcggacgcagcggccctcgagcacgacaaggcctacgaccagcagctcaaagcgggtgacaatccgtacctgcggtataatcacgctgacgccgagtttcaggagcgtctgcaagaagatacgtcttttgggggcaacctcgggcgagcagtcttccaggccaagaagcgggttctcgaacctctcggtctggttgaggaaggcgctaagacggctcctggaaagaagagaccggtagagccgtcaccacagcgttcccccgactcctccacgggcatcggcaagaaaggccagcagcccgccagaaagagactcaatttcggtcagactggcgactcagagtcagtccccgaccctcaacctatcggagaacctccagcagcgccctctagtgtgggatctggtacaatggctgcaggcggtggcgcaccaatggcagacaataacgaaggtgccgacggagtgggtagttcctcgggaaattggcattgcgattccacatggctgggcgacagagtcatcaccaccagcacccgaacctgggccctgcccacctacaacaaccacctctacaagcaaatctccaacgggacctcgggaggcagcaccaacgacaacacctactttggctacagcaccccctgggggtattttgactttaacagattccactgccacttctcaccacgtgactggcagcgactcatcaacaacaactggggattccggcccaagagactcagcttcaagctcttcaacatccaggtcaaagaggtcacgcagaatgaaggcaccaagaccatcgccaataaccttaccagcacggttcaggtcttttcggactcggaataccagctgccctacgtcctcggctccgcacaccagggctgcctgcctccgttcccggcggacgtcttcatgattccccagtacggctacctgactctgaacaatggcagccaatcggtgggtcgttcctctttctactgcctggaatatttcccttctcaaatgctgagaacgggcaacaacttcaccttcagctacaccttcgaggacgttcccttccacagcagctacgcacacagccagagcctggaccggctgatgaatcctcttatcgaccagtacctgtattacctggccagaacacagagcaacgcaggaggcacagctggcaatcgggaactgcagttttatcagggcgggcctaccaccatggccgaacaagccaaaaactggctgcctggaccttgcttccggcaacaaagagtctccaagacgctggatcaaaacaacaacagcaactttgcttggactggtgccaccaaataccatctaaatggaagaaattcattggttaatcccggtgtcgccatggcaacccacaaggacgacgaggaacgcttcttcccttcgagcggagtcctgatttttggaaaaactggagcagctaataagactacactggaaaatgtgttaatgacaaatgaagaggaaattcgtcctaccaacccggtagccaccgaggaatacgggactgttagcagcaacctgcaggcggctaacactgcagcccagacacaagttgtcaacaaccagggagccttacctggtatggtctggcagaaccgggacgtgtacctgcagggtcccatctgggccaagattcctcacacggacggcaactttcacccgtctccgctgatgggcggctttggactgaagcatccgcctcctcagatcctgatcaaaaacactcctgttcctgctaatcccccggaggtgtttacgcctgccaagtttgcttctttcatcacacagtacagcaccggccaggtcagcgtggagatcgagtgggagctgcagaaggagaacagcaagcgctggaacccagagattcagtatacctccaattttgacaaacagactggtgtggactttgccgttgacagccagggtgtttattctgagcctcgccccattggtactcgttacctcacccgtaatctgtaa

SEQ ID NO: 474 - protein, 738 aa, Adeno-associated virus
MAADGYLPDWLEDNLSEGIREWWDLKPGAPKPKANQQKQDDGRGLVLPGYKHLGPFNGLDKGEPVNAADAAALEHDKAYDQQLKAGDNPYLRYNHADAEFQERLQEDTSFGGNLGRAVFQAKKRVLEPLGLVEEGAKTAPGKKRPVEPSPQRSPDSSTGIGKKGQQPARKRLNFGQTGDSESVPDPQPIGEPPAAPSSVGSGTMAAGGGAPMADNNEGADGVGSSSGNWHCDSTWLGDRVITTSTRTWALPTYNNHLYKQISNGTSGGSTNDNTYFGYSTPWGYFDFNRFHCHFSPRDWQRLINNNWGFRPKRLSFKLFNIQVKEVTQNEGTKTIANNLTSTVQVFSDSEYQLPYVLGSAHQGCLPPFPADVFMIPQYGYLTLNNGSQSVGRSSFYCLEYFPSQMLRTGNNFTFSYTFEDVPFHSSYAHSQSLDRLMNPLIDQYLYYLARTQSNAGGTAGNRELQFYQGGPTTMAEQAKNWLPGPCFRQQRVSKTLDQNNNSNFAWTGATKYHLNGRNSLVNPGVAMATHKDDEERFFPSSGVLIFGKTGAANKTTLENVLMTNEEEIRPTNPVATEEYGTVSSNLQAANTAAQTQVVNNQGALPGMVWQNRDVYLQGPIWAKIPHTDGNFHPSPLMGGFGLKHPPPQILIKNTPVPANPPEVFTPAKFASFITQYSTGQVSVEIEWELQKENSKRWNPEIQYTSNFDKQTGVDFAVDSQGVYSEPRPIGTRYLTRNL

SEQ ID NO: 475 - protein, 737 aa, Adeno-associated virus
MAADGYLPDWLEDNLSEGIREWWDLKPGAPKPKANQQKQDDGRGLVLPGYKYLGPFNGLDKGEPVNAADAAALEHDKAYDQQLKAGDNPYLRYNHADAEFQERLQEDTSFGGNLGRAVFQAKKRVLEPLGLVEEAAKTAPGKKRPVEPSPQRSPDSSTGIGKKGQQPARKRLNFGQTGDSESVPDPQPIGEPPAGPSGLGSGTMAAGGGAPMADNNKGADGVGNASGNWHCDSTWLGDRVITTSTRTWALPTYNNHLYKQISSQSAGSTNDNVYFGYSTPWGYFDFNRFHCHFSPRDWQRLINSNWGFRPKKLNFKLFNIQVKEVTTNDGVTTIANNLTSTVQVFSDSEYQLPYVLGSAHQGCLPPFPADVFMIPQYGYLTLNNGSQSVGRSSFYCLEYFPSQMLRTGNNFTFSYTFEDVPFHSSYAHSQSLDRLMNPLIDQYLYYLARTQSNAGGTAGNRELQFYQGGPTTMAEQAKNWLPGPCFRQQRVSKTLDQNNNSNFAWTGATKYHLNGRNSLVNPGVAMATHKDDEERFFPSSGVLIFGKTGAANKTTLENVLMTNEEEIRPTNPVATEEYGTVSSNLQAANTAAQTQVVNNQGALPGMVWQNRDVYLQGPIWAKIPHTDGNFHPSPLMGGFGLKHPPPQILIKNTPVPANPPEVFTPAKFASFITQYSTGQVSVEIEWELQKENSKRWNPEIQYTSNFDKQTGVDFAVDSQGVYSEPRPIGTRYLTRNL

SEQ ID NO: 476 - protein, 737 aa, Adeno-associated virus
MAADGYLPDWLEDNLSEGIREWWDLKPGAPKPKANQQKQDDGRGLVLPGYKYLGPFNGLDKGEPVNAADAAALEHDKAYDQQLKAGDNPYLRYNHADAEFQERLQEDTSFGGNLGRAVFQAKKRVLEPLGLVEEAAKTAPGKKRPVEPSPQRSPDSSTGIGKKGQQPARKRLNFGQTGDSESVPDPQPIGEPPAGPSGLGSGTMAAGGGAPMADNNEGADGVGNASGNWHCDSTWLGDRVITTSTRTWALPTYNNHLYKQISSQSAGSTNDNVYFGYSTPWGYFDFNRFHCHFSPRDWQRLINSNWGFRPKKLNFKLFNIQVKEVTTNDGVTTIANNLTSTVQVFSDSEYQLPYVLGSAHQGCLPPFPADVFMIPQYGYLTLNNGSQSVGRSSFYCLEYFPSQMLRTGNNFTFSYTFEDVPFHSSYAHSQSLDRLMNPLIDQYLYYLARTQSNAGGTAGNRELQFYQGGPTTMAEQAKNWLPGPCFRQQRVSKTLDQNNNSNFAWTGATKYHLNGRNSLVNPGVAMATHKDDEERFFPSSGVLIFGKTGAANKTTLENVLMTNEEEIRPTNPVATEEYGTVSSNLQAANTAAQTQVVNNQGALPGMVWQNRDVYLQGPIWAKIPHTDGNFHPSPLMGGFGLKHPPPQILIKNTPVPANPPEVFTPAKFASFITQYSTGQVSVEIEWELQKENSKRWNPEIQYTSNFDKQTGVDFAVDSQGVYSEPRPIGTRYLTRNL

SEQ ID NO: 477 - protein, 737 aa, Adeno-associated virus
MAADGYLPDWLEDNLSEGIREWWDLKPGAPKPKANQQKQDDGRGLVLPGYKYLGPFNGLDKGEPVNAADAAALEHDKAYDQQLKAGDNPYLRYNHADAEFQERLQEDTSFGGNLGRAVFQAKKRVLEPLGLVEEAAKTAPGKKRPVEPSPQRSPDSSTGIGKKGQQPARKRLNFGQTGDSESVPDPQPIGEPPAGPSGLGSGTMAAGGGAPMADNNEGADGVGNASGNWHCDSTWLGDRVITTSTRTWALPTYNNHLYKQISSQSAGSTNDNVYFGYSTPWGYFDFNRFHCHFSPRDWQRLINNNWGFRPKKLNFKLFNIQVKEVTTNDGVTTIANNLTSTVQVFSDSEYQLPYVLGSAHQGCLPPFPADVFMIPQYGYLTLNNGSQSVGRSSFYCLEYFPSQMLRTGNNFTFSYTFEDVPFHSSYAHSQSLDRLMNPLIDQYLYYLARTQSNAGGTAGNRELQFYQGGPTTMAEQAKNWLPGPCFRQQRVSKTLDQNNNSNFAWTGATKYHLNGRNSLVNPGVAMATHKDDEERFFPSSGVLIFGKTGAANKTTLENVLMTNEEEIRPTNPVATEEYGTVSSNLQAANTAAQTQVVNNQGALPGMVWQNRDVYLQGPIWAKIPHTDGNFHPSPLMGGFGLKHPPPQILIKNTPVPANPPEVFTPAKFASFITQYSTGQVSVEIEWELQKENSKRWNPEIQYTSNFDKQTGVDFAVDSQGVYSEPRPIGTRYLTRNL

SEQ ID NO: 478 - protein, 737 aa, Adeno-associated virus
MAADGYLPDWLEDNLSEGIREWWDLKPGAPKPKANQQKQDDGRGLVLPGYKYLGPFNGLDKGEPVNAADAAALEHDKAYDQQLKAGDNPYLRYNHADAEFQERLQEDTSFGGNLGRAVFQAKKRVLEPLGLVEEAAKTAPGKKRPVEPSPQRSPDSSTGIGKKGQQPARKRLNFGQTGDSESVPDPQPIGEPPAGPSGLGSGTMAAGGGAPMADNNKGADGVGNASGNWHCDSTWLGDRVITTSTRTWALPTYNNHLYKQISSQSAGSTNDNVYFGYSTPWGYFDFNRFHCHFSPRDWQRLINNNWGFRPKKLNFKLFNIQVKEVTTNDGVTTIANNLTSTVQVFSDSEYQLPYVLGSAHQGCLPPFPADVFMIPQYGYLTLNNGSQSVGRSSFYCLEYFPSQMLRTGNNFTFSYTFEDVPFHSSYAHSQSLDRLMNPLIDQYLYYLARTQSNAGGTAGNRELQFYQGGPTTMAEQAKNWLPGPCFRQQRVSKTLDQNNNSNFAWTGATKYHLNGRNSLVNPGVAMATHKDDEERFFPSSGVLIFGKTGAANKTTLENVLMTNEEEIRPTNPVATEEYGTVSSNLQAANTAAQTQVVNNQGALPGMVWQNRDVYLQGPIWAKIPHTDGNFHPSPLMGGFGLKHPPPQILIKNTPVPANPPEVFTPAKFASFITQYSTGQVSVEIEWELQKENSKRWNPEIQYTSNFDKQTGVDFAVDSQGVYSEPRPIGTRYLTRNL

SEQ ID NO: 479 - DNA, 2214 bp, Adeno-associated virus
atggctgctgacggttatcttccagattggctcgaggacaacctctctgagggcattcgcgagtggtgggacctgaaacctggagcccccaagcccaaggccaaccagcagaagcaggacgacggccggggtctggtgcttcctggctacaagtacctcggacccttcaacggactcgacaagggggagcccgtcaacgcggcggacgcagcggccctcgagcacgacaaggcctacgaccagcagctcaaagcgggtgacaatccgtacctgcggtataaccacgccgacgccgagtttcaggagcgtctgcaagaagatacgtcttttgggggcaacctcgggcgagcagtcttccaggccaagaagcgggttctcgaacctctcggtctggttgaggaagctgctaagacggctcctggaaagaagagaccggtagaaccgtcacctcagcgttcccccgactcctccacgggcatcggcaagaaaggccagcagcccgctagaaagagactgaactttgggcagactggcgactcagagtcagtccccgaccctcaaccaatcggagaaccaccagcaggcccctctggtctgggatctggtacaatggctgcaggcggtggcgcaccaatggctgacaataacaagggcgccgacggagtgggtaatgcctcaggaaattggcattgcgattccacatggctgggcgacagagtcatcaccaccagcacccgaacctgggctttgcccacctacaacaaccacctctacaagcaaatctccagtcagtcagcaggtagcaccaacgacaacgtctacttcggctacagcaccccctgggggtattttgacttcaacagattccactgtcacttctcaccacgtgactggcagcggctcatcaacagcaactggggattccggcccaagaagctcaacttcaagctgttcaacatccaggtcaaggaggtcacaacgaatgacggcgtcacgaccatcgccaataaccttaccagcacggttcaggtcttttcggactcggaataccagctgccctacgtcctcggctccgcacaccagggctgcctgcctccgttcccggcggacgtcttcatgattccccagtacggctacctgactctgaacaatggcagccaatcggtgggtcgttcctctttctactgcctggaatatttcccttctcaaatgctgagaacgggcaacaacttcaccttcagctacaccttcgaggacgttcccttccacagcagctacgcacacagccagagcctggaccggctgatgaatcctcttatcgaccagtacctgtattacctggccagaacacagagcaacgcaggaggcacagctggcaatcgggaactgcagttttatcagggcgggcctaccaccatggccgaacaagccaaaaactggctgcctggaccttgcttccggcaacaaagagtctccaagacgctggatcaaaacaacaacagcaactttgcttggactggtgccaccaaataccatctaaatggaagaaattcattggttaatcccggtgtcgccatggcaacccacaaggacgacgaggaacgcttcttcccttcgagcggagtcctgatttttggaaaaactggagcagctaataagactacactggaaaatgtgttaatgacaaatgaagaggaaattcgtcctaccaacccggtagccaccgaggaatacgggactgttagcagcaacctgcaggcggctaacactgcagcccagacacaagttgtcaacaaccagggagccttacctggtatggtctggcagaaccgggacgtgtacctgcagggtcccatctgggccaagattcctcacacggacggcaactttcacccgtctccgctgatgggcggctttggactgaagcatccgcctcctcagatcctgatcaaaaacactcctgttcctgctaatcccccggaggtgtttacgcctgccaagtttgcttctttcatcacacagtacagcaccggccaggtcagcgtggagatcgagtgggagctgcagaaggagaacagcaagcgctggaacccagagattcagtatacctccaattttgacaaacagactggtgtggactttgccgttgacagccagggtgtttattctgagcctcgccccattggtactcgttacctcacccgtaatctgtaa

SEQ ID NO: 480 - DNA, 2217 bp, Adeno-associated virus
atggctgccgatggttatcttccagattggctcgaggacaacctctctgagggcattcgcgagtggtgggacctgaaacctggagccccgaaacccaaagccaaccagcaaaagcaggacgacggccggggtctggtgcttcctggctacaagtacctcggacccttcaacggactcgacaagggggagcccgtcaacgcggcggacgcagcggccctcgagcacgacaaggcctacgaccagcagctcaaagcgggtgacaatccgcacctgcggtataatcacgccgacgccgagtttcaggagcgtctgcaagaagatacgtcttttgggggcaacctcgggcgagcagtcttccaggccaagaagcgggttctcgaacctctcggtctggttgaggaaggcgctaagacggctcctggaaagaagagaccggtagagccgtcaccacagcgttcccccgactcctccacgggcatcggcaagaaaggccagcagcccgccagaaagagactcaatttcggtcagactggcgactcagagtcagtccccgaccctcaacttatcggagaacctccagcagcgccctctagtgtgggatctggtacaatggctgcaggcggtggcgcaccaatggcagacaataacgaaggtgccgacggagtgggtagttcctcgggaaattggcattgcgattccacatggctgggcgacagagtcatcaccaccagcacccgaacctgggccctgcccacctacaacaaccacctctacaagcaaatctccaacgggacctcgggaggcagcaccaacgacaacacctactttggctacagcaccccctgggggtattttgactttaacagattccactgccacttctcaccacgtgactggcagcgactcatcaacaacaactggggattccggcccaagagactcagcttcaagctcttcaacatccaggtcaaagaggtcacgcagaatgaaggcaccaagaccatcgccaataacctcaccagcaccatccaggtgtttacggactcggagtaccagctgccgtacgtcctcggctctgcccaccagggctgcctgcctccgttcccggcggacgtcttcatgattcctcagtacggcaacctgactctcaacaacggtagtcaggccgtgggacgttcctccttctactgcctggagtacttcccctctcagatgctgagaacgggcaacaacttttccttcagctacactttcgaggacgtgcctttccacagcagctacgcgcacagccagagtttggacaggctgatgaatcctctcatcgaccagtacctgtactacctgtcaagaacccagtctacgggaggcacagcgggaacccagcagttgctgttttctcaggccgggcctagcaacatgtcggctcaggccagaaactggctgcctggaccctgctacagacagcagcgcgtctccacgacactgtcgcaaaacaacaacagcaactttgcctggactggtgccaccaagtatcatctgaacggcagagactctctggtgaatccgggcgtcgccatggcaaccaacaaggacgacgaggaccgcttcttcccatccagcggcatcctcatgtttggcaagcagggagctggaaaagacaacatgggctatagcaacgtgatgctaaccagcgaggaagaaatcaagaccaccaaccccgtggccacagaacagtatggcgtggtggctgataacctacagcagcaaaacaccgctcctattgtgggggccgtcaacagccagggagccttacctggcatggtctggcagaaccgggacgtgtacctgcagggtcctatttgggccaagattcctcacacagatggcaactttcacccgtctcctttaatgggcggctttggacttaaacatccgcctcctcagatcctcatcaaaaacactcctgttcctgcggatcctccaacagcgttcaaccaggccaagctgaattctttcatcacgcagtacggcaccggacaagtcagcgtggagatcgagtgggagctgcagaaggagaacagcaagcgctggaacccagagattcagtatacttccaactactacaaatctacaaatgtggactttgctgttaatactgagggtgtttactctgagcctcgccccattggcactcgttacctcacccgtaatctgtaa

SEQ ID NO: 481 - protein, 738 aa, Adeno-associated virus
MAADGYLPDWLEDNLSEGIREWWDLKPGAPKPKANQQKQDDGRGLVLPGYKYLGPFNGLDKGEPVNAADAAALEHDKAYDQQLKAGDNPHLRYNHADAEFQERLQEDTSFGGNLGRAVFQAKKRVLEPLGLVEEGAKTAPGKKRPVEPSPQRSPDSSTGIGKKGQQPARKRLNFGQTGDSESVPDPQLIGEPPAAPSSVGSGTMAAGGGAPMADNNEGADGVGSSSGNWHCDSTWLGDRVITTSTRTWALPTYNNHLYKQISNGTSGGSTNDNTYFGYSTPWGYFDFNRFHCHFSPRDWQRLINNNWGFRPKRLSFKLFNIQVKEVTQNEGTKTIANNLTSTIQVFTDSEYQLPYVLGSAHQGCLPPFPADVFMIPQYGNLTLNNGSQAVGRSSFYCLEYFPSQMLRTGNNFSFSYTFEDVPFHSSYAHSQSLDRLMNPLIDQYLYYLSRTQSTGGTAGTQQLLFSQAGPSNMSAQARNWLPGPCYRQQRVSTTLSQNNNSNFAWTGATKYHLNGRDSLVNPGVAMATNKDDEDRFFPSSGILMFGKQGAGKDNMGYSNVMLTSEEEIKTTNPVATEQYGVVADNLQQQNTAPIVGAVNSQGALPGMVWQNRDVYLQGPIWAKIPHTDGNFHPSPLMGGFGLKHPPPQILIKNTPVPADPPTAFNQAKLNSFITQYGTGQVSVEIEWELQKENSKRWNPEIQYTSNYYKSTNVDFAVNTEGVYSEPRPIGTRYLTRNL

SEQ ID NO: 482 - DNA, 2217 bp, Adeno-associated virus
atggctgccgatggttatcttccagattggctcgaggacaacctctctgagggcattcgcgagtggtgggacctgaaacctggagccccgaaacccaaagccaaccagcaaaagcaggacgacggccggggtctggtgcttcctggctacaagtacctcggacccttcaacggactcgacaagggggagcccgtcaacgcggcggacgcagcggccctcgagcacgacaaggcctacgaccagcagctcaaagcgggtgacaatccgtacctgcggtataatcacgccgacgccgagtttcaggagcgtctgcaagaagatacgtcttttgggggcaacctcgggcgagcagtcttccaggccaagaagcgggttctcgaacctctcggtctggttgaggaaggcgctaagacggctcctggaaagaagagaccggtagagccgtcaccacagcgttcccccgactcctccacgggcatcggcaagaaaggccagcagcccgccggaaagagactcaatttcggtcagactggcgactcagagtcagtccccgaccctcaacctatcggagaacctccagcagcgccctctagtgtgggatctggtacaatggctgcaggcggtggcgcaccaatggcagacaataacgaaggtgccgacggagtgggtagttcctcgggaaattggcattgcgattccacatggctgggcgacagagtcatcaccaccagcacccgaacctgggccctgcccacctacaacaaccacctctacaagcaaatctccaacgggacctcgggaggcagcaccaacgacaacacctactttggctacagcaccccctgggggtattttgactttaacagattccactgccacttctcaccacgtgactggcagcgactcatcaacaacaactggggattccggcccaagagactcagcttcaagctcttcaacatccaggtcaaagaggtcacgcagaatgaaggcaccaagaccatcgccaataacctcaccagcaccatccaggtgtttacggactcggaataccagctgccgtacgtcctcggctctgcccaccagggctgcctgcctccgttcccggcggacgtcttcatgattcctcagtacggctacctgactctcaacaacggtagtcaggccgtgggacgttcctccttctactgcctggagtacttcccctctcagatgctgagaacgggcaacaacttttccttcagctacactttcgaggacgtgcctttccacagcagctacgcgcacagccagagtttggacaggctgatgaatcctctcgtcgaccagtacctgtactacctgtcaagaacccagtctacgggaggcacagcgggaacccagcagttgctgttttctcaggccgggcctagcaacatgtcggctcaggccagaaactggctgcctggaccctgctacagacagcagcgcgtctccacgacactgtcgcaaaacaacaacagcaactttgcctggactggtgccaccaagtatcatctgaacggcagagactctctggtgaatccgggcgtcgccatggcaaccaacaaggacgacgaggaccgcttcttcccatccagcggcatcctcatgtttggcaagcagggagctggaaaagacaacgtggactatagcaacgtgatgctaaccagcgaggaagaaatcaagaccaccaaccccgtggccacagaacagtatggcgtggtggctgataacctacagcagcaaaacaccgctcctattgtgggggccgtcaacagccagggagccttacctggcatggtctggcagaaccgggacgtgtacctgcagggtcctatttgggccaagattcctcacacagatggcaactttcacccgtctcctttaatgggcggctttggacttaaacatccgcctcctcagatcctcatcaaaaacactcctgttcctgcggatcctccaacagcgttcaaccaggccaagctgaattctttcatcacgcagtacagcaccggacaagtcagcgtggagatcgagtgggagctgcagaaggagaacagcaagcgctggagcccagagattcagtatacttccaactactacaaatctacaaatgtggactttgctgttaatactgagggtgtttactctgagcctcgccccattggcactcgttacctcacccgtaatctgtaa

SEQ ID NO: 483 - protein, 738 aa, Adeno-associated virus
MAADGYLPDWLEDNLSEGIREWWDLKPGAPKPKANQQKQDDGRGLVLPGYKYLGPFNGLDKGEPVNAADAAALEHDKAYDQQLKAGDNPYLRYNHADAEFQERLQEDTSFGGNLGRAVFQAKKRVLEPLGLVEEGAKTAPGKKRPVEPSPQRSPDSSTGIGKKGQQPAGKRLNFGQTGDSESVPDPQPIGEPPAAPSSVGSGTMAAGGGAPMADNNEGADGVGSSSGNWHCDSTWLGDRVITTSTRTWALPTYNNHLYKQISNGTSGGSTNDNTYFGYSTPWGYFDFNRFHCHFSPRDWQRLINNNWGFRPKRLSFKLFNIQVKEVTQNEGTKTIANNLTSTIQVFTDSEYQLPYVLGSAHQGCLPPFPADVFMIPQYGYLTLNNGSQAVGRSSFYCLEYFPSQMLRTGNNFSFSYTFEDVPFHSSYAHSQSLDRLMNPLVDQYLYYLSRTQSTGGTAGTQQLLFSQAGPSNMSAQARNWLPGPCYRQQRVSTTLSQNNNSNFAWTGATKYHLNGRDSLVNPGVAMATNKDDEDRFFPSSGILMFGKQGAGKDNVDYSNVMLTSEEEIKTTNPVATEQYGVVADNLQQQNTAPIVGAVNSQGALPGMVWQNRDVYLQGPIWAKIPHTDGNFHPSPLMGGFGLKHPPPQILIKNTPVPADPPTAFNQAKLNSFITQYSTGQVSVEIEWELQKENSKRWSPEIQYTSNYYKSTNVDFAVNTEGVYSEPRPIGTRYLTRNL

SEQ ID NO: 484 - DNA, 2217 bp, Adeno-associated virus
atggttgccgatggttatcttccagattggctcgaggacaacctctctgagggcattcgcgagtggtgggacctgaaacctggagccccgaaacccaaagccaaccagcaaaagcagggcgacggccggggtctggtgcttcctggctacaagtacctcggacccttcaacggactcgacaagggggagcccgtcaacgcggcggacgcagcggccctcgagcacgacaaggcctacgaccagcagcttaaagcgggtgacaatccgtacctgcggtataatcacgccgacgccgagcttcaggagcgtctgcaagaagatacgtcttttgggggcaacctcgggcgagcagtcttccaggccaagaagcgggttctcgaacctctcggtctggttgaggaaggcgctaagacggctcctggaaagaagagaccggtagagccgtcaccacagcgttcccccgactcctccacgggcatcggcaagaaaggccagcagcccgccagaaagagactcaatttcggtcagactggcgactcagagtcagtccccgaccctcaacctatcggagaacctccagcagcgccctctagtgtgggatctggtacaatggctgcaggcggtggcgcgccaatggcagacaataacgaaggtgccgacggagtgggtagttcctcgggaaattggcattgcgattccacatggctgggcgacagagtcatcaccaccagcacccgaacctgggccctgcccacctacaacaaccacctctacaagcaaatctccaacgggacctcgggaggcagcaccaacgacaacacctactttggctacagcaccccctgggggtattttgactttaacagattccactgccacttctcaccacgtgactggcagcgactcatcaacaacaactggggattccggcccaagagactcagcttcaagctcttcaacatccaggtcaaagaggtcacgcagaatgaaggcaccaagaccatcgccaataacctcaccagcaccatccaggtgtttacggactcggaataccagctgccgtacgtcctcggctctgcccaccagggctgccagcctccgttcccggcggacgtcttcatgattcctcagtacggctacctgactctcaacaacggtagtcaggccgtgggacgttcctccttctactgcctggagtacttcccctctcagatgctgagaacgggcaacaacttttccttcagctacactttcgaggacgtgcctttccacagcagctacgcgcacagccagagtttggacaggctgatgaatcctctcatcgaccagtacctgtactacctgtcaagaacccagtctacgggaggcacagcgggaacccagcagttgctgttttctcaggccgggcctagcaacatgtcggctcaggccagaaactggctgcctggaccctgctacagacagcagcgcgtctccacgacactgtcgcaaaacaacaacagcaactttgcctggactggtgccaccaagtatcatctgaacggcagagactctctggtgaatccgggcgtcgccatggcaaccaacaaggacgacgaggaccgcttcttcccatccagcggcatcctcatgtttggcaagcagggagctggaaaagacaacgtggactatagcaacgtgatgctaaccagcgaggaagaaatcaagaccaccaaccccgtggccacagaacagtatggcgtggtggctgataacctacagcagcaaaacaccgctcctattgtgggggccgtcaacagccagggagccttacctggcatggtctggcagaaccgggacgtgtacctgcagggtcctatttgggccaagattcctcacacagatggcaactttcacccgtctcctttaatgggcggctttggacttaaacatccgcctcctcagatcctcatcaaaaacactcctgttcctgcggatcctccaacagcgttcaaccaggccaagctgaattctttcatcacgcagtacagcaccggacaagtcagcgtggagatcgagtgggagccgcagaaggagaacagcaagcgctggaacccagagattcagtatacttccaactactacaaatctacaaatgtggactttgctgttaatactgagggtgtttactctgagcctcgccccattggcactcgttacctcacccgtaatctgtaa

SEQ ID NO: 485 - protein, 738 aa, Adeno-associated virus
MVADGYLPDWLEDNLSEGIREWWDLKPGAPKPKANQQKQGDGRGLVLPGYKYLGPFNGLDKGEPVNAADAAALEHDKAYDQQLKAGDNPYLRYNHADAELQERLQEDTSFGGNLGRAVFQAKKRVLEPLGLVEEGAKTAPGKKRPVEPSPQRSPDSSTGIGKKGQQPARKRLNFGQTGDSESVPDPQPIGEPPAAPSSVGSGTMAAGGGAPMADNNEGADGVGSSSGNWHCDSTWLGDRVITTSTRTWALPTYNNHLYKQISNGTSGGSTNDNTYFGYSTPWGYFDFNRFHCHFSPRDWQRLINNNWGFRPKRLSFKLFNIQVKEVTQNEGTKTIANNLTSTIQVFTDSEYQLPYVLGSAHQGCQPPFPADVFMIPQYGYLTLNNGSQAVGRSSFYCLEYFPSQMLRTGNNFSFSYTFEDVPFHSSYAHSQSLDRLMNPLIDQYLYYLSRTQSTGGTAGTQQLLFSQAGPSNMSAQARNWLPGPCYRQQRVSTTLSQNNNSNFAWTGATKYHLNGRDSLVNPGVAMATNKDDEDRFFPSSGILMFGKQGAGKDNVDYSNVMLTSEEEIKTTNPVATEQYGVVADNLQQQNTAPIVGAVNSQGALPGMVWQNRDVYLQGPIWAKIPHTDGNFHPSPLMGGFGLKHPPPQILIKNTPVPADPPTAFNQAKLNSFITQYSTGQVSVEIEWEPQKENSKRWNPEIQYTSNYYKSTNVDFAVNTEGVYSEPRPIGTRYLTRNL

SEQ ID NO: 486 - DNA, 2217 bp, Adeno-associated virus
atggctgccgatggttatcttccagattggctcgaggacaacctctctgagggcattcgcgagtggtgggacctgaaacctggagccccgaaacccaaagccaaccagcaaaagcaggacgacggccggggtctggtgcttcctggctacaagtacctcggacccttcaacggactcgacaagggggagcccgtcaacgcggcggacgcagcggccctcgagcacgacaaggcctacgaccagcagctcaaagcgggtgacaatccgtacctgcggtataatcacgccgacgccgagtttcaggagcgtctgcaagaagatacgtcttttgggggcaacctcgggcgagcagtcttccaggccaagaagcgggttctcgaacctctcggtctggttgaggaaggcgctaagacggctcctggaaagaagagaccggtagagccgtcaccacagcgttcccccgactcctccacgggcatcggcaagaaaggccagcagcccgccagaaagagactcaatttcggtcagactggcgactcagagtcagtccccgaccctcaacctatcggagaacctccagcagcgccctctagtgtgggatctggtacaatggctgcaggcggtggcgcaccaatggcagacaataacgaaggtgccgacggagtgggtagttcctcgggaaattggcattgcgattccacatggctgggcgacagagtcatcaccaccagcacccgaacctgggccctgcccacctacaacaaccacctctacaagcaaatctccaacgggacctcgggaggcagcaccaacgacaacacctactttggctacagcaccccctgggggtattttgactttaacagattccactgccacttctcaccacgtgactggcagcgactcatcaacaacaactggggattccggcccaagagactcagcttcaagctcttcaacatccaggtcaaagaggtcacgcagaatgaaggcaccaagaccatcgccaatagcctcaccagcaccatccaggtgtttacggactcggaataccagctgccgtacgtcctcggctctgcccaccagggctgcctgcctccgttcccggcggacgtcttcatgattcctcagtacggctacctgactcccaacaacggtagtcaggccgtgggacgttcctccttctactgcctggagtacttcccctctcagatgctgagaacgggcaacaacttttccttcagctacactttcgaggacgtgcctttccacagcagctacgcgcacagccagagtttggacaggctgatgaatcctctcatcgaccagtacctgtactacctgtcaagaacccagtctacgggaggcacagcgggaacccagcagttgctgtcttctcaggccgggcctagcaacatgtcggctcaggccagaaactggctgcctggaccctgctacagacagcagcgcgtctccacgacactgtcgcaaaacaacaacagcaactttgcctggactggtgccaccaagtatcatctgaacggcagagactctctggtgaatccgggcgtcgccatggcaaccaacaaggacgacgaggaccgcttcttcccatccagcggcatcctcatgtttggcaagcagggagctggaaaagacaacgtggactatagcaacgtgatgctaaccagcgaggaagaaatcaagaccaccaaccccgtggccacagaacagtatggcgtggtggctgataacctacagcagcaaaacaccgctcctattgtgggggccgtcaacagccagggagccttacctggcatggtctggcagaaccgggacgtgtacttgcagggtcctatttgggccaagattcctcacacagatggcaactttcacccgtctcctttaatgggcggctttggacttaaacatccgcctcctcagatcctcatcaaaaacactcctgttcctgcggatcctccaacagcgttcaaccaggccaagctgaattctttcatcacgcagtacagcaccggacaagtcagcgtggagatcgagtgggagctgcagaaggagaacagcaagcgctggaacccagagattcagtatacttccaactactacaaatctacaaatgtggactttgctgttaatactgagggtgtttactctgagcctcgccccattggcactcgttacctcacccgtaatctgtaa

SEQ ID NO: 487 - protein, 738 aa, Adeno-associated virus
MAADGYLPDWLEDNLSEGIREWWDLKPGAPKPKANQQKQDDGRGLVLPGYKYLGPFNGLDKGEPVNAADAAALEHDKAYDQQLKAGDNPYLRYNHADAEFQERLQEDTSFGGNLGRAVFQAKKRVLEPLGLVEEGAKTAPGKKRPVEPSPQRSPDSSTGIGKKGQQPARKRLNFGQTGDSESVPDPQPIGEPPAAPSSVGSGTMAAGGGAPMADNNEGADGVGSSSGNWHCDSTWLGDRVITTSTRTWALPTYNNHLYKQISNGTSGGSTNDNTYFGYSTPWGYFDFNRFHCHFSPRDWQRLINNNWGFRPKRLSFKLFNIQVKEVTQNEGTKTIANSLTSTIQVFTDSEYQLPYVLGSAHQGCLPPFPADVFMIPQYGYLTPNNGSQAVGRSSFYCLEYFPSQMLRTGNNFSFSYTFEDVPFHSSYAHSQSLDRLMNPLIDQYLYYLSRTQSTGGTAGTQQLLSSQAGPSNMSAQARNWLPGPCYRQQRVSTTLSQNNNSNFAWTGATKYHLNGRDSLVNPGVAMATNKDDEDRFFPSSGILMFGKQGAGKDNVDYSNVMLTSEEEIKTTNPVATEQYGVVADNLQQQNTAPIVGAVNSQGALPGMVWQNRDVYLQGPIWAKIPHTDGNFHPSPLMGGFGLKHPPPQILIKNTPVPADPPTAFNQAKLNSFITQYSTGQVSVEIEWELQKENSKRWNPEIQYTSNYYKSTNVDFAVNTEGVYSEPRPIGTRYLTRNL

SEQ ID NO: 488 - protein, 738 aa, Adeno-associated virus
MAADGYLPDWLEDNLSEGIREWWDLKPGAPKPKANQQKQDDGRGLVLPGYKYLGPFNGLDKGEPVNAADAAALEHDKAYDQQLKAGDNPYLRYNHADAEFQERLQEDTSFGGNLGRAVFQAKKRVLEPLGLVEEGAKTAPGKKRPVEPSPQRSPDSSTGIGKKGQQPARKRLNFGQTGDSESVPDPQPIGEPPAAPSSVGSGTMAAGGGAPMADNNEGADGVGSSSGNWHCDSTWLGDRVITTSTRTWALPTYNNHLYKQISNGTSGGSTNDNTYFGYSTPWGYFDFNRFHCHFSPRDWQRLINNNWGFRPKRLSFKLFNIQVKEVTQNEGTKTIANNLTSTIQVFTDSEYQLPYVLGSAHQGCLPPFPADVFMIPQYGYLTLNNGSQAVGRSSFYCLEYFPSQMLRTGNNFSFSYTFEDVPFHSSYVHSQSLDRLMNPLIDQYLYYLSRTQSTGGTAGTQQLLFSQAGPSNMSAQARNWLPGPCYRQQRVSTTLSQNNNSNFAWTGATKYHLNGRDSLVNSGVAMATNKDDEDRFFPSSGILMFGKQGAGKDNVDYSNVMLTSEEEIKTTNPVATEQYGVVADNLQQQNTAPIVGAVNSQGALPGMVWQNRDVYLQGPIWAKIPHTDGNFHPSPLMGGFGLKHPPPQILIKNTPVPADPPTAFNQAKLNSFITQYSTGQVSVEIEWELQKENSKRWNPEIQYTSNYYKSTNVDFAVNTEGVYSEPRPIGTRYPTRNL

SEQ ID NO: 489 - DNA, 2217 bp, Adeno-associated virus
atggctgccgatggttatcttccagattggctcgaggacaacctctctgagggcattcgcgagtggtgggacctgaaacctggagccccgaaacccaaagccaaccagcaaaagcaggacgacggccggggtctggtgcttcctggctacaagtacctcggacccttcaacggactcgacaagggggagcccgtcaacgcggcggacgcagcggccctcgagcacgacaaggcctacgaccagcagctcaaagcgggtgacaatccgtacctgcggtataatcacgccgacgccgagtttcaggagcgtctgcaagaagatacgtcttttgggggcaacctcgggcgagcagtcttccaggccaagaagcgggttctcgaacctctcggtctggttgaggaaggcgctaagacggctcctggaaagaagagaccggtagagccgtcaccacagcgttcccccgactcctccacgggcatcggcaagaaaggccagcagcccgccagaaagagactcaatttcggtcagactggcgactcagagtcagtccccgaccctcaacctatcggagaacctccagcagcgccctctagtgtgggatctggtacaatggctgcaggcggtggcgcaccaatggcagacaataacgaaggtgccgacggagtgggtagttcctcgggaaattggcattgcgattccacatggctgggcgacagagtcatcaccaccagcacccgaacctgggccctgcccacctacaacaaccacctctacaagcaaatctccaacgggacctcgggaggcagcaccaacgacaacacctactttggctacagcaccccctgggggtattttgactttaacagattccactgccacttctcaccacgtgactggcagcgactcatcaacaacaactggggattccggcccaagagactcagcttcaagctcttcaacatccaggtcaaagaggtcacgcagaatgaaggcaccaagaccatcgccaataacctcaccagcaccatccaggtgtttacggactcggaataccagctgccgtacgtcctcggctctgcccaccagggctgcctgcctccgttcccggcggacgtcttcatgattcctcagtacggctacctgactctcaacaacggtagtcaggccgtgggacgttcctccttctactgcctggagtacttcccctctcagatgctgagaacgggcaacaacttttccttcagctacactttcgaggacgtgcctttccacagcagctacgtgcacagccagagtttggacaggctgatgaatcctctcatcgaccagtacctgtactacctgtcaagaacccagtctacgggaggcacagcgggaacccagcagttgctgttttctcaggccgggcctagcaacatgtcggctcaggccagaaactggctgcctggaccctgctacagacagcagcgcgtctccacgacactgtcgcaaaacaacaacagcaactttgcctggactggtgccaccaagtatcatctgaacggcagagactctctggtgaattcgggcgtcgccatggcaaccaacaaggacgacgaggaccgcttcttcccatccagcggcatcctcatgtttggcaagcagggagctggaaaagacaacgtggactatagcaacgtgatgctaaccagcgaggaagaaatcaagaccaccaaccccgtggccacagaacagtatggcgtggtggctgataacctacagcagcaaaacaccgctcctattgtgggggccgtcaacagccagggagccttacctggcatggtctggcagaaccgggacgtgtacctgcagggtcctatttgggccaagattcctcacacagatggcaactttcacccgtctcctttaatgggcggctttggacttaaacatccgcctcctcagatcctcatcaaaaacactcctgttcctgcggatcctccaacagcgttcaaccaggccaagctgaattctttcatcacgcagtacagcaccggacaagtcagcgtggagatcgagtgggagctgcagaaggagaacagcaagcgctggaacccagagattcagtatacttccaactactacaaatctacaaatgtggactttgctgttaatactgagggtgtttactctgagcctcgccccattggcactcgttaccccacccgtaatctgtaa

SEQ ID NO: 490 - protein, 734 aa, Adeno-associated virus; identical to SEQ ID NO: 315

SEQ ID NO: 491 - DNA, 2214 bp, Adeno-associated virus
atggctgctgacggttatcttccagattggctcgaggacaacctctctgagggcattcgcgagtggtgggacctgaaacctggagccccgaaacccaaagccaaccagcagaagcaggacgacggccggggtctggtgcttcctggctacaagtacctcggacccttcaacggactcgacaagggggagcccgtcaacgcggcggacgcagcggccctcgagcacgacaaggcctacgaccagcagctcaaagcgggtgacaatccgtacctgcggtataaccacgccgacgccgagtttcaggagcgtctgcaagaagatacgtcttttgggggcaacctcgggcgagcagtcttccaggccaagaagcgggttctcgaacctctcggtctggttgaggaagctgctaagacggctcctggaaagaagagaccggtagaaccgtcacctcagcgttcccccgactcctccacgggcatcggcaagaaaggccagcagcccgctagaaagagactgaactttgggcagactggcgactcagagtcagtccccgaccctcaacctctcggagaaccaccagcaggcccctctggtctgggatctggtacaatggctgcaggcggtggcgctccaatggcagacaataacgaaggcgccgacggagtgggtaatgcctcaggaaattggcattgcgattccacatggctgggcgacagagtcatcaccaccagcacccgaacctgggctttgcccacctacaacaaccacctctacaagcaaatctccagtcagtcagcaggtagcaccaacgacaacgtctacttcggctacagcaccccctgggggtattttgacttcaacagattccactgtcacttctcaccacgtgactggcagcgactcatcaacaacaactggggattccggcccaagaagctcaacttcaagctcttcaacatccaagtcaaggaggtcacgacgaatgacggcgtcacgaccatcgctaataaccttaccagcacggttcaggtcttttcggactcggagtaccagctgccgtacgtcctcggctctgcccaccagggctgcctgcctccgttcccggcggacgtcttcatgattcctcagtacggctacctgactctgaacaatggcagccaatcggtgggacgttcatccttctactgcctggaatacttcccttctcaggtgctgagaacgggtaacaacttcaccttcagttacaccttcgaggacgtgcctttccacagcagctacgcgcacagccagagcctagaccggctgatgaatcccctcatcgaccagtacctgtattacctggctagaacacagagtaacccaggaggcacatctggcaatcgggaactgcagttttaccagggcgggccttccaccatggccgaacaagccaagaactggttacctggaccttgcttccggcaacaaagagtttccaaaacactggatcaaaacaacaacagcaactttgcttggactggtgccaccaaatatcacctgaacggcagaaactcattggtgaatcctggtgtcgccatggcaactcacaaggacgacgaggaccgctttttcccatccagcggagtcctgatttttggaaaaactggagcaaccaacaagactacattggaaaacgtgttaatgacaaatgaagaagaaattcgtcctactaatcctgtggccacagaagaatacgggatagtcagcagcaatttacaagcggccaatactgcagcccagacacaagttgtcaacaaccagggagccttacctggcatggtctggcagaaccgggacgtgtacctgcagggtcccatctgggccaaaattcctcacacagacggcaactttcacccgtctccgctgatgggcggctttggactgaagcatccgcctcctcagatcctgatcaaaaacactcctgttcctgctaatcccccggaggtgtttacgcctgccaagtttgcttctttcatcacacagtacagcaccggccaggtcagcgtggagatcgagtgggagctgcagaaggagaacagcaagcgctggaacccagagattcagtatacctccaattttgacaaacagactggtgtggactttgccgttgacagccagggtgtttattctgagcctcgccccattggtactcgttacctcacccgtaatctgtaa

SEQ ID NO: 492 - protein, 737 aa, Adeno-associated virus
MAADGYLPDWLEDNLSEGIREWWDLKPGAPKPKANQQKQDDGRGLVLPGYKYLGPFNGLDKGEPVNAADAAALEHDKAYDQQLKAGDNPYLRYNHADAEFQERLQEDTSFGGNLGRAVFQAKKRVLEPLGLVEEAAKTAPGKKRPVEPSPQRSPDSSTGIGKKGQQPARKRLNFGQTGDSESVPDPQPLGEPPAGPSGLGSGTMAAGGGAPMADNNEGADGVGNASGNWHCDSTWLGDRVITTSTRTWALPTYNNHLYKQISSQSAGSTNDNVYFGYSTPWGYFDFNRFHCHFSPRDWQRLINNNWGFRPKKLNFKLFNIQVKEVTTNDGVTTIANNLTSTVQVFSDSEYQLPYVLGSAHQGCLPPFPADVFMIPQYGYLTLNNGSQSVGRSSFYCLEYFPSQVLRTGNNFTFSYTFEDVPFHSSYAHSQSLDRLMNPLIDQYLYYLARTQSNPGGTSGNRELQFYQGGPSTMAEQAKNWLPGPCFRQQRVSKTLDQNNNSNFAWTGATKYHLNGRNSLVNPGVAMATHKDDEDRFFPSSGVLIFGKTGATNKTTLENVLMTNEEEIRPTNPVATEEYGIVSSNLQAANTAAQTQVVNNQGALPGMVWQNRDVYLQGPIWAKIPHTDGNFHPSPLMGGFGLKHPPPQILIKNTPVPANPPEVFTPAKFASFITQYSTGQVSVEIEWELQKENSKRWNPEIQYTSNFDKQTGVDFAVDSQGVYSEPRPIGTRYLTRNL

SEQ ID NO: 493 - DNA, 2214 bp, Adeno-associated virus
atggctgccgatggttatcttccagattggctcgaggacaacctctctgagggcattcgcgagtggtgggacctgaaacctggagccccgaaacccaaagccaaccagcaaaagcaggacgacggccggggtctggtgcttcctggctacaagtacctcggacccttcaacggactcgacaagggggagcccgtcaacgcggcggacgcagcggccctcgagcacgacaaggcctacgaccagcagctcaaagcgggtgacaatccgtacctgcggtataatcacgccgacgccgagtttcaggagcgtctgcaagaagatacgtcttttgggggcaacctcgggcgagcagtcttccaggccaagaagcgggttctcgaacctctcggtctggttgaggaaggcgctaagacggctcctggaaagaagagaccggtagagccgtcaccacagcgttcccccgactcctccacgggcatcggcaagaaaggccagcagcccgccagaaagagactcaatttcggtcagactggcgactcagagtcagtccccgaccctcaacctatcggagaacctccagcagcgccctctagtgtgggatctggtacaatggctgcaggcggtggcgcaccaatggcagacaataacgaaggtgccgacggagtgggtagttcctcgggaaattggcattgcgattccacacggctgggcgacagagtcatcaccaccagcacccggacctgggctttgcccacctacaacaaccacctctacaagcaaatctccagtcagtcagcaggtagcaccaacgacaacgtctacttcggctacagcaccccctgggggtattttgacttcaacagattccactgtcacttctcaccacgtgactggcagcggctcatcaacaacaactggggattccggcccaagaagctcaacttcaagctgttcaacatccaggtcaaggaggtcacaacgaatgacggcgtcacgaccatcgccaataaccttaccagcacggttcaggtcttttcggactcggaataccagctgccctacgtcctcggctccgcacaccagggctgcctgcctccgttcccggcggacgtcttcatgattccccagtacggctacctgactctgaacaatggcagccaatcggtgggtcgttcctctttctactgcctggaatatttcccttctcaaatgctgagaacgggcaacaacttcaccttcagctacaccttcgaggacgttcccttccacagcagctacgcacacagccagagcctggaccggctgatgaatcctcttatcgaccagtacctgtattacctggccagaacacagagcaacgcaggaggcacagctggcaatcgggaactgcagttttatcagggcgggcctaccaccatggccgaacaagccaaaaactggctgcctggaccttgcttccggcaacgaagagtctccaagacgctggatcaaaacaacaacagcaactttgcttggactggtgccaccaaataccatctaaatggaagaaattcattggttaatcccggtgtcgccatggcaacccacaaggacgacgaggaacgcttcttcccttcgagcggagtcctgatttttggaaaaactggagcagctaataagactacactggaaaatgtgttaatgacaaatgaagaggaaattcgtcctaccaacccggtagccaccgaggaatacgggactgttagcagcaacctgcaggcggctaacactgcagcccagacacaagttgtcaacaaccagggagccttacctggtatggtctggcagaaccgggacgtgtacctgcagggtcccatctgggccaagattcctcacacggacggcaactttcacccgtctccgctgatgggcggctttggactgaagcatccgcctcctcagatcctgatcaaaaacactcctgttcctgctaatcccccggaggtgtttacgcctgccaagtttgcttctttcatcacacagtacagcaccggccaggtcagcgtggagatcgagtgggagctgcagaaggagaacagcaagcgctggaacccagagattcagtatacctccaattttgacaaacagactggtgtggactttgccgttgacagccagggtgtttattctgagcctcgccccattggtactcgttacctcacccgtaatctgtaa

SEQ ID NO: 494 - protein, 737 aa, Adeno-associated virus
MAADGYLPDWLEDNLSEGIREWWDLKPGAPKPKANQQKQDDGRGLVLPGYKYLGPFNGLDKGEPVNAADAAALEHDKAYDQQLKAGDNPYLRYNHADAEFQERLQEDTSFGGNLGRAVFQAKKRVLEPLGLVEEGAKTAPGKKRPVEPSPQRSPDSSTGIGKKGQQPARKRLNFGQTGDSESVPDPQPIGEPPAAPSSVGSGTMAAGGGAPMADNNEGADGVGSSSGNWHCDSTRLGDRVITTSTRTWALPTYNNHLYKQISSQSAGSTNDNVYFGYSTPWGYFDFNRFHCHFSPRDWQRLINNNWGFRPKKLNFKLFNIQVKEVTTNDGVTTIANNLTSTVQVFSDSEYQLPYVLGSAHQGCLPPFPADVFMIPQYGYLTLNNGSQSVGRSSFYCLEYFPSQMLRTGNNFTFSYTFEDVPFHSSYAHSQSLDRLMNPLIDQYLYYLARTQSNAGGTAGNRELQFYQGGPTTMAEQAKNWLPGPCFRQRRVSKTLDQNNNSNFAWTGATKYHLNGRNSLVNPGVAMATHKDDEERFFPSSGVLIFGKTGAANKTTLENVLMTNEEEIRPTNPVATEEYGTVSSNLQAANTAAQTQVVNNQGALPGMVWQNRDVYLQGPIWAKIPHTDGNFHPSPLMGGFGLKHPPPQILIKNTPVPANPPEVFTPAKFASFITQYSTGQVSVEIEWELQKENSKRWNPEIQYTSNFDKQTGVDFAVDSQGVYSEPRPIGTRYLTRNL

SEQ ID NO: 495 - DNA, 2208 bp, Adeno-associated virus
atggctgccgatggttatcttccagattggctcgaggacactctctctgaaggaataagacagtggtggaagctcaaacctggcccaccaccaccaaagcccgcagagcggcataaggacgacagcaggggtcttgtgcttcctgggtacaagtacctcggacccttcaacggactcgacaagggggagccggtcaacgaggcagacgccgcggccctcgagcacgacaaggcctacgaccggcagctcgacagcggagacaacccgtacctcaagtacaaccacgccgacgcggagtttcaggagcgtcttaaagaagatacgtcttttgggggcaacctcggacgagcagtcttccaggcgaaaaagagggttcttgaacctctgggcctggttgaggaacctgttaagacggctccgggaaaaaagaggccggtagagcactctcctgcggagccagactcctcctcgggaaccggaaaagcgggccagcagcctgcaagaaaaagattgaattttggtcagactggagacgcagactccgtacctgacccccagcctctcggacagccaccagcagccccctctggtttgggatctactacaatggctacaggcagtggcgcaccaatggcagacaataacgagggtgccgatggagtgggtaattcttcaggaaattggcattgcgattcccaatggctgggcgacagagtcatcaccaccagcacccgaacctgggcccagcccacctacaacaaccacctctacaagcaaatctcaagccaatcaggagcctcaaacgacaaccactactttggctacagcaccccttgggggtattttgacttcaacagattccactgccacttttcaccacgtgactggcaaagactcatcaacaacaactggggattccgacccaagagactcaacttcaagctctttaacattcaagtcaaagaggtcacgcagaatgacggtacgacgacgattgccaataaccttaccagcacggttcaggtgtttactgactcggagtaccagctcccgtacgtcctcgggtcggcgcatcaaggatgcctcccgccgtttccagcggacgtcttcatggtcccacagtatggatacctcaccctgaacaacgggagtcaggcggtaggacgctcttccttttactgcctggagtactttccttctcagatgcttcgtactggaaacaactttcagttcagctacacctttgaagacgttcctttccacagcagctacgctcacagccagagtctggatcggctgatgaatcctctgatcgaccagtacctgtattatctgaacaaaacacaatcaaatagtggagctcttcagcagtctcggctactgtttagtcaagctggacccaccagcatgtctcttcaagctaaaaactggctacctggaccttgctacagacagcagcgtctgtcaaagcaggcaaacgacaacaacaacagcaactttccctggactgcggctacaaagtaccacctaaatggccgggactcgttggttaatccaggaccagctatggccagtcacaaagacgatgaagaaaagtttttccccatgcatggaaccctgatatttggtaaacaaggaacaaatgctaacgacgcggatttggacaatgtcatgattacagatgaagaagaaatccgcaccaccaatcccgtggctacggagcagtacggatatgtgtcaaataatttgcaaaactcaaatactggtccaactactggaactgtcaatcaccgaggagcgttacctggcatggtgtggcaggatcgagacgtgtacctgcagggacccatttgggccaagattcctcacaccgatggacactttcatccttctccactgatgggaggttttgggctcaaacacccgcctcctcagatcatgatcaaaaacactcccgttccagccaatcctcccacaaacttcagttctgccaagtttgcttctttcatcacacagtattccacggggcaggtcagcgtggagatcgagtgggagctgcagaaagagaacagcaaacgctggaatcccgaaattcagtacacttccaactacaacaaatctgttaatgtggactttactgtggacactaatggcgtgtattcagagcctcgccccattggcaccagatacctgactcgtaatctgtaa

SEQ ID NO: 496 - protein, 735 aa, Adeno-associated virus
MAADGYLPDWLEDTLSEGIRQWWKLKPGPPPPKPAERHKDDSRGLVLPGYKYLGPFNGLDKGEPVNEADAAALEHDKAYDRQLDSGDNPYLKYNHADAEFQERLKEDTSFGGNLGRAVFQAKKRVLEPLGLVEEPVKTAPGKKRPVEHSPAEPDSSSGTGKAGQQPARKRLNFGQTGDADSVPDPQPLGQPPAAPSGLGSTTMATGSGAPMADNNEGADGVGNSSGNWHCDSQWLGDRVITTSTRTWAQPTYNNHLYKQISSQSGASNDNHYFGYSTPWGYFDFNRFHCHFSPRDWQRLINNNWGFRPKRLNFKLFNIQVKEVTQNDGTTTIANNLTSTVQVFTDSEYQLPYVLGSAHQGCLPPFPADVFMVPQYGYLTLNNGSQAVGRSSFYCLEYFPSQMLRTGNNFQFSYTFEDVPFHSSYAHSQSLDRLMNPLIDQYLYYLNKTQSNSGALQQSRLLFSQAGPTSMSLQAKNWLPGPCYRQQRLSKQANDNNNSNFPWTAATKYHLNGRDSLVNPGPAMASHKDDEEKFFPMHGTLIFGKQGTNANDADLDNVMITDEEEIRTTNPVATEQYGYVSNNLQNSNTGPTTGTVNHRGALPGMVWQDRDVYLQGPIWAKIPHTDGHFHPSPLMGGFGLKHPPPQIMIKNTPVPANPPTNFSSAKFASFITQYSTGQVSVEIEWELQKENSKRWNPEIQYTSNYNKSVNVDFTVDTNGVYSEPRPIGTRYLTRNL

SEQ ID NO: 497 - DNA, 2217 bp, Adeno-associated virus
atggctgccgatggttatcttccagattggctcgaggacaacctctctgagggcattcgcgagtggtgggcgctgaaacctggagccccgaagcccaaagccaaccagcaaaagcaggacgacggccggggtctggtgcttcctggctacaagtacctcggacccttcaacggactcgacaagggggagcccgtcaacgcggcggacgcagcggccctcgagcacgacaaggcctacgaccagcagctgcaggcgggtgacaatccgtacctgcggtataatcacgccgacgccgagtttcaggagcgtctgcaagaagatacgtcttttgggggcaacctcgggcgagcagtcttccaggccaagaagcgggttctcgaacctctcggtctggttgaggaaggcgctaagacggctcctggaaagaagagaccggtagagccgtcaccacagcgttcccccgactcctccacgggcatcggcaagaaaggccagcagcccgccagaaagagactcaatttcggtcagactggcgactcagagtcagtccccgaccctcaacctatcggagaacctccagcagcgccctctagtgtgggatctggtacaatggctgcaggcggtggcgcgccaatggcagacaataacgaaggtgccgacggagtgggtagttcctcgggaaattggcattgcgattccacatggctgggcgacagagtcatcaccaccagcacccgaacctgggccctgcccacctacaacaaccacctctacaagcaaacctccaacgggacctcgggaggcagcaccaacgacaacacctactttggctacagcaccccctgggggtattttgactttaacagattccactgccacttctcaccacgtgactggcagcgactcatcaacaacaactggggattccggcccaagagactcagcttcaagctcttcaacatccaggtcaaagaggtcacgcagaatgaaggcaccaagaccatcgccaataacctcaccagcaccatccaggtgtttacggactcggaataccagctgccgtacgtcctcggctctgcccaccagggctgcctgcctccgttcccggcggacgtcttcatgattcctcagtacggctacctgactctcaacaacggtagtcaggccgtgggacgttcctccttctactgcctggagtacttcccctctcagatgctgagaacgggcaacaacttttccttcagctacactttcgaggacgtgcctttccacagcagctacgcgcacagccagagtttggacaggctgatgaatcctctcatcgaccagtacctgtactacctgtcaagaacccagtctacgggaggcacagcgggaacccagcagttgctgttttctcaggccgggcctagcaacatgtcggctcaggccagaaactggctgcctggaccctgctacagacagcagcgcgtctccacgacactgtcgcaaaacaacaacagcaactttgcctggactggtgccaccaagtatcatctgaacggcagagactctctggtgaatccgggcgtcgccatggcaaccaacaaggacgacgaggaccgcttcttcccatccagcggcatcctcatgtttggcaagcagggagctggaaaagacaacgtggactatagcaacgtgatgctaaccagcgaggaagaaatcaagaccaccaaccccgtggccacagaacagtatggcgtggtggctgataacctacagcagcaaaacaccgctcctattgtgggggccgtcaacagccagggagccttacctggcatggtctggcagaaccgggacgtgtacctgcagggtcctatttgggccaagattcctcacacagatggcaactttcacccgtctcctttaatgggcggctttggacttaaacatccgcctcctcagatcctcatcaaaaacactcctgttcctgcggatcctccaacagcgttcaaccaggccaagctgaattctttcatcacgcagtacagcaccggacaagtcagcgcggagatcgagtgggagctgcagaaggagaacagcaagcgctggaacccagagattcagtatacttccaactactacaaatctacaaatgtggactttgctgttaatactgagggtgtttactctgagcctcgccccattggcactcgttacctcacccgtaatctgtaa

SEQ ID NO: 498 - protein, 738 aa, Adeno-associated virus
MAADGYLPDWLEDNLSEGIREWWALKPGAPKPKANQQKQDDGRGLVLPGYKYLGPFNGLDKGEPVNAADAAALEHDKAYDQQLQAGDNPYLRYNHADAEFQERLQEDTSFGGNLGRAVFQAKKRVLEPLGLVEEGAKTAPGKKRPVEPSPQRSPDSSTGIGKKGQQPARKRLNFGQTGDSESVPDPQPIGEPPAAPSSVGSGTMAAGGGAPMADNNEGADGVGSSSGNWHCDSTWLGDRVITTSTRTWALPTYNNHLYKQTSNGTSGGSTNDNTYFGYSTPWGYFDFNRFHCHFSPRDWQRLINNNWGFRPKRLSFKLFNIQVKEVTQNEGTKTIANNLTSTIQVFTDSEYQLPYVLGSAHQGCLPPFPADVFMIPQYGYLTLNNGSQAVGRSSFYCLEYFPSQMLRTGNNFSFSYTFEDVPFHSSYAHSQSLDRLMNPLIDQYLYYLSRTQSTGGTAGTQQLLFSQAGPSNMSAQARNWLPGPCYRQQRVSTTLSQNNNSNFAWTGATKYHLNGRDSLVNPGVAMATNKDDEDRFFPSSGILMFGKQGAGKDNVDYSNVMLTSEEEIKTTNPVATEQYGVVADNLQQQNTAPIVGAVNSQGALPGMVWQNRDVYLQGPIWAKIPHTDGNFHPSPLMGGFGLKHPPPQILIKNTPVPADPPTAFNQAKLNSFITQYSTGQVSAEIEWELQKENSKRWNPEIQYTSNYYKSTNVDFAVNTEGVYSEPRPIGTRYLTRNL

SEQ ID NO: 499 - DNA, 2217 bp, Adeno-associated virus
atggctgctgacggttatcttccagattggctcgaggacaacctctctgagggcattcgcgagtggtgggacctgaaacctggagcccccaagcccaaggccaaccagcagaagcaggacgacggccggggtctggtgcttcctggctacaagtacctcggacccttcaacggactcgacaagggggagcccgtcaacgcggcggacgcagcggccctcgagcacgacaaggcctacgaccagcagctcaaagcgggtgacaatccgtacctgcggtataatcacgccgacgccgagtttcaggagcgtctgcaagaagatacgtcttttgggggcaacctcgggcgagcagtcttccaggccaagaagcgggttctcgaacctctcggtctggttgaggaagctgctaagacggctcctggaaagaagagaccggtagaaccgtcacctcagcgttcccccgactcctccacgggcatcggcaagaaaggccagcagcccgctagaaagagactgaactttgggcagactggcgactcagagtcagtccccgaccctcaaccaatcggagaacctccagcagcgccctctagtgtgggatctggtacaatggccgcaggcggtggcgcaccaatggcagacaataacgaaggtgccgacggagtgggtagttcctcgggaaattggcattgcgattccacatggctgggcgacagagtcatcaccaccagcacccgaacctgggccctgcccacctacaacaaccacctctacaagcaaatctccaacgggacctcgggaggcagcaccaacgacaacacctactttggctacagcaccccctgggggtattttgactttaacagattccactgccacttctcaccacgtgactggcagcgactcatcaacaacaactggggattccggcccaagagactcagcttcaagctcttcaacatccaggtcaaagaggtcacgcagaatgaaggcaccaagaccatcgccaataacctcaccagcaccatccaggtgtttacggactcggaataccagctgccgtacgtcctcggctctgcccaccagggctgcctgcctccgttcccggcggacgtcttcatgattcctcagtacggctacctgactctcaacaacggtagtcaggccgtgggacgttcctccttctactgcctggagtacttcccctctcagatgctgagaacgggcaacaacttttccttcagctacactttcgaggacgtgcctttccacagcagctacgcgcacagccagagtttggacaggctgatgaatcctctcatcgaccagtacctgtactacctgtcaagaacccagtctacgggaggcacagcgggaacccagcagctgctgttttctcaggccgggcctagcaacatgtcggctcaggccagaaactggctgcctggaccctgctacagacagcagcgcgtctccacgacactgtcgcaaaacaacaacagcaactttgcctggactggtgccaccaagtatcatctgaacggcagagactctctggtgaatccgggcgtcgccatggcaaccaacaaggacgacgaggaccgcttcttcccatccagcggcatcctcatgtttggcaagcagggagctggaaaagacaacgtggactatagcaacgtgatgctaaccagcgaggaagaaatcaagaccaccaaccccgtggccacagaacagtatggcgtggtggctgataacctacagcagcaaaacaccgctcctattgtgggggccgtcaacagccagggagccttacctggcatggtctggcagaaccgggacgtgtacctgcagggtcctatttgggccaagattcctcacacagatggcaactttcacccgtctcctttaatgggcggctttggacttaaacatccgcctcctcagatcctcatcaaaagcactcctgttcctgcggatcctccaacagcgttcaaccaggccaagctgaattctttcatcacgcagtacagcaccggacaagtcagcgtggagatcgagtgggagctgcagaaggagaacagcaagtgctggaacccagagattcagtatacttccaactactacaaatctacaaatgtggactttgctgttaatactgagggtgtttactctgagcctcgccccattggcactcgttacctcacccgtaatctgtaa

SEQ ID NO: 500 - protein, 738 aa, Adeno-associated virus
MAADGYLPDWLEDNLSEGIREWWDLKPGAPKPKANQQKQDDGRGLVLPGYKYLGPFNGLDKGEPVNAADAAALEHDKAYDQQLKAGDNPYLRYNHADAEFQERLQEDTSFGGNLGRAVFQAKKRVLEPLGLVEEAAKTAPGKKRPVEPSPQRSPDSSTGIGKKGQQPARKRLNFGQTGDSESVPDPQPIGEPPAAPSSVGSGTMAAGGGAPMADNNEGADGVGSSSGNWHCDSTWLGDRVITTSTRTWALPTYNNHLYKQISNGTSGGSTNDNTYFGYSTPWGYFDFNRFHCHFSPRDWQRLINNNWGFRPKRLSFKLFNIQVKEVTQNEGTKTIANNLTSTIQVFTDSEYQLPYVLGSAHQGCLPPFPADVFMIPQYGYLTLNNGSQAVGRSSFYCLEYFPSQMLRTGNNFSFSYTFEDVPFHSSYAHSQSLDRLMNPLIDQYLYYLSRTQSTGGTAGTQQLLFSQAGPSNMSAQARNWLPGPCYRQQRVSTTLSQNNNSNFAWTGATKYHLNGRDSLVNPGVAMATNKDDEDRFFPSSGILMFGKQGAGKDNVDYSNVMLTSEEEIKTTNPVATEQYGVVADNLQQQNTAPIVGAVNSQGALPGMVWQNRDVYLQGPIWAKIPHTDGNFHPSPLMGGFGLKHPPPQILIKSTPVPADPPTAFNQAKLNSFITQYSTGQVSVEIEWELQKENSKCWNPEIQYTSNYYKSTNVDFAVNTEGVYSEPRPIGTRYLTRNL

SEQ ID NO: 501 - protein, 738 aa, Adeno-associated virus
MAADGYLPDWLEDNLSEGIREWWDLKPGAPKPKANQQKQDDGRGLVLPGYKYLGPFNGLDKGEPVNAADAAALEHDKAYDQQLKAGDNPYLRYNHADAEFQERLQEDTSFGGNLGRAVFQAKKRVLEPLGLVEEAAKTAPGKKRPVEPSPQRSPDSSTGIGKKGQQPARKRLNFGQTGDSESVPDPQPIGEPPAAPSSVGSGTMAAGGGAPMADNNEGADGVGSSSGNWHCDSTWLGDRVITTSTRTWALPTYNNHLYKQISNGTSGGSTNDNTYFGYSTPWGYFDFNRFHCHFSPRDWQRLINNNWGFRPKRLSFKLFNIQVKEVTQNEGTKTIANNLTSTIQVFTDSEYQLPYVLGSAHQGCLPPFPADVFMIPQYGYLTLNNGSQAVGRSSFYCLEYFPSQMLRTGNNFSFSYTFEDVPFHSSYAHSQSLDRLMNPLIDQYLYYLSRTQSTGGTAGTQQLLFSQAGPSNMSAQARNWLPGPCYRQQRVSTTLSQNNNSNFAWTGATKYHLNGRDSLVNPGVAMATNKDDEDRFFPSSGILMFGKQGAGKDNVDYSNVMLTSEEEIKTTNPVATEQYGVVADNLQQQNTAPIVGAVNSQGALPGMVWQNRDVYLQGPIWAKIPHTDGNFHPSPLMGGFGLKHPPPQILIKSTPVPADPPTAFNQAKLNSFITQYSTGQVSVEIEWELQKENSKRWNPEIQYTSNYYKSTNVDFAVNTEGVYSEPRPIGTRYLTRNL

SEQ ID NO: 502 - DNA, 2217 bp, Adeno-associated virus
atggctgctgacggttatcttccagattggctcgaggacaacctctctgagggcattcgcgagtggtgggacctgaaacctggagcccccaagcccaaggccaaccagcagaagcaggacgacggccggggtctggtgcttcctggctacaagtacctcggacccttcaacggactcgacaagggggagcccgtcaacgcggcggacgcagcggccctcgagcacgacaaggcctacgaccagcagctcaaagcgggtgacaatccgtacctgcggtataaccacgccgacgccgagtttcaggagcgtctgcaagaagatacgtcttttgggggcaacctcgggcgagcagtcttccaggccaagaagcgggttctcgaacctctcggtctggttgaggaagctgctaagacggctcctggaaagaagagaccggtagaaccgtcacctcagcgttcccccgactcctccacgggcatcggcaagaaaggccagcagcccgctagaaagagactgaactttgggcagactggcgactcagagtcagtccccgaccctcaaccaatcggagaaccaccagcaggcccctctggtctgggatctggtacaatggctgcaggcggtggcgcaccaatggctgacaataacgagggcgccgacggagtgggtaatgcctcaggaaattggcattgcgattccacatggctgggcgacagagtcatcaccaccagcacccgaacctgggctttgcccacctacaacaaccacctctacaagcaaatctccagtcagtcagcaggtagcaccaacgacaacgtctacttcggctacagcaccccctgggggtattttgacttcaacagattccactgtcacttctcaccacgtgactggcagcggctcatcaacaacaactggggattccggcccaagaagctcaacttcaagctgttcaacatccaggtcaaggaggtcacaacgaatgacggcgtcacgaccatcgccaataaccctaccagcacggttcaggtcttttcggactcggaataccagctgccctacgtcctcggctccgcacaccagggctgcctgcctccgttcccggcggacgtcttcatgattccccagtacggctacctgactctgaacaatggcagccaatcggtgggtcgttcctctttctactgcctggaatatttcccttctcaaatgctgagaacgggcaacaacttcaccttcagctacaccttcgaggacgttcccttccacagcagctacgcacacagccagagcctggaccggctgatgaatcctcttatcgaccagtacctgtattacctggccagaacacagagcaacgcaggaggcacagctggcaatcgggaactgcagttttatcagggcgggcctaccaccatggccgaacaagccaaaaactggctgcctggaccctgctacagacagcagcgcgtctccacgacactgtcgcaaaacaacaacagcaactttgcctggactggtgccaccaagtatcatctgaacggcagagactctctggtgaatccgggcgtcgccatggcaaccaacaaggacgacgaggaccgcttcttcccatccagcggcatcctcatgtttggcaagcagggagctggaaaagacaacgtggactatagcaacgtgatgctaaccagcgaggaagaaatcaagaccaccaaccccgtggccacagaacagtatggcgtggtggctgataacctacagcagcaaaacaccgctcctattgtgggggccgtcaacagccagggagccttacctggcatggtctggcagaaccgggacgtgtacctgcagggtcctatttgggccaagattcctcacacagatggcaactttcacccgtctcctttaatgggcggctttggacttaaacatccgcctcctcagatcctcatcaaaaacactcctgttcctgcggatcctccaacagcgttcaaccaggccaagctgaattctttcatcacgcagtacagcaccggacaagtcagcgtggagatcgagtgggagctgcagaaggagaacagcaagcgctggaacccagagattcagtatacttccaactactacaaatctacaaatgtggactttgctgttaatactgagggtgtttactctgagcctcgccccattggcactcgttacctcacccgtaatctgtaa

SEQ ID NO: 503 - protein, 738 aa, Adeno-associated virus
MAADGYLPDWLEDNLSEGIREWWDLKPGAPKPKANQQKQDDGRGLVLPGYKYLGPFNGLDKGEPVNAADAAALEHDKAYDQQLKAGDNPYLRYNHADAEFQERLQEDTSFGGNLGRAVFQAKKRVLEPLGLVEEAAKTAPGKKRPVEPSPQRSPDSSTGIGKKGQQPARKRLNFGQTGDSESVPDPQPIGEPPAGPSGLGSGTMAAGGGAPMADNNEGADGVGNASGNWHCDSTWLGDRVITTSTRTWALPTYNNHLYKQISSQSAGSTNDNVYFGYSTPWGYFDFNRFHCHFSPRDWQRLINNNWGFRPKKLNFKLFNIQVKEVTTNDGVTTIANNPTSTVQVFSDSEYQLPYVLGSAHQGCLPPFPADVFMIPQYGYLTLNNGSQSVGRSSFYCLEYFPSQMLRTGNNFTFSYTFEDVPFHSSYAHSQSLDRLMNPLIDQYLYYLARTQSNAGGTAGNRELQFYQGGPTTMAEQAKNWLPGPCYRQQRVSTTLSQNNNSNFAWTGATKYHLNGRDSLVNPGVAMATNKDDEDRFFPSSGILMFGKQGAGKDNVDYSNVMLTSEEEIKTTNPVATEQYGVVADNLQQQNTAPIVGAVNSQGALPGMVWQNRDVYLQGPIWAKIPHTDGNFHPSPLMGGFGLKHPPPQILIKNTPVPADPPTAFNQAKLNSFITQYSTGQVSVEIEWELQKENSKRWNPEIQYTSNYYKSTNVDFAVNTEGVYSEPRPIGTRYLTRNL

SEQ ID NO: 504 - DNA, 2208 bp, Adeno-associated virus
atggctgccgatggttatcttccagattggctcgaggacaacctctctgagggcattcacgagtggtgggacccgaaacctggagccccgaaacccaaagccaaccagcaaaagcaggacgacggccggggtctggtgcttcctggctacaagtacctcggacccttcaacggactcgacaagggggagcccgtcaacgcggcggacgcagcggccctcgagcacgacaaggcctacgaccagcagctcaaagcgggtgacaatccgtacctgcggtataatcacgccgacgccgagtttcaggagcgtctgcaagaagatacgtcttttgggggcaacctcgggcgagcagtcttccaggccaagaagcgggttctcgaacctctcggtctggttgaggaaggcgctaagacggctcctggaaagaagagaccggtagagccgtcaccacagcgttcccccgactcctccacgggcatcggcaagaaaggccagcagcccgccagaaagagactcaatttcggtcagactggcgactcagagtcagtccccgaccctcaacctatcggagaacctccagcagcgccctctagtgtgggatctggtacaatggctgcaggcggtggcgcaccaatggcagacaataacgaaggtgccgacggagtgggtagttcctcgggaaattggcattgcgattccacatggctgggcgacagagtcatcaccaccagcacccgaacctgggccctgcccacccacaacaaccacctctacaagcaaatctccaacgggacctcgggaggcagcaccaacgacaacgtctacttcggctacagcaccccctgggggtattttgacttcaacagattccactgtcacttctcaccacgtgaccggcagcgactcatcaacaacaactggggattccggcccaagagactcagcttcaagctcttcaacatccaggtcaaagaggtcacgcagaatgaaggcaccaagaccatcgccaataacctcaccagcaccatccaggtgtttacggactcggaataccagctgccgtacgtcctcggctctgcccaccagggctgcctgcctccgttcccggcggacgtcttcatgattcctcagtacggctacctgactctcaacaacggtagtcaggccgtgggacgttcctccttctactgcctggagtacttcccctctcagatgctgagaacgggcaacaacttttccttcagctacactttcgaggacgtgcctttccacagcagctacgcgcacagccagagtttggacaggctgatgaatcctctcatcgaccagtacctgtactacctgtcaagaacccagtctacggaaggcacagcgggaacccagcagttgctgttttctcaggccgggcctagcaacatgtcggctcaggccagaaactggctgcctggaccctgctacagacagcagcgcgtctccacgacactgtcgcaaaacaacaacagcaactttgcctggactggtgccaccaagtatcatctgaacggcagagactctctggtgaatccgggcgtcgccatggcaacccacaaggacgacgaggaacgcttcttcccttcgagcggagtcctgatttttggaaaaactggagcagctaataagactacactggaaaatgtgttaatgacaaatgaagaggaaattcgtcctaccaacccggtagccaccgaggaatacgggactgttagcagcaacctgcaggcggctaacactgcagcccagacacaagttgtcaacaaccagggagccttacctggtatggtctggcagaaccgggacgtgtacctgcagggtcccatctgggccaagattcctcacacggacggcaactttcacccgtctccgctgatgggcggctttggactgaagcatcctcagatcctgatcaaaaacactcctgttcctgctaatcccccggaggtgtttacgcctgccaagtttgcttctttcatcacacagtacagcaccggccaggtcagcgtggagatcgagtgggagctgcagaaggagaacagcaagcgctggaacccagagattcagtatacctccaattttgacaaacagactggtgtggactttgccgttgacagccagggtgtttattctgagcctcgccccattggtactcgttacctcacccgtaatctgtaa

SEQ ID NO: 505 - protein, 735 aa, Adeno-associated virus
MAADGYLPDWLEDNLSEGIHEWWDPKPGAPKPKANQQKQDDGRGLVLPGYKYLGPFNGLDKGEPVNAADAAALEHDKAYDQQLKAGDNPYLRYNHADAEFQERLQEDTSFGGNLGRAVFQAKKRVLEPLGLVEEGAKTAPGKKRPVEPSPQRSPDSSTGIGKKGQQPARKRLNFGQTGDSESVPDPQPIGEPPAAPSSVGSGTMAAGGGAPMADNNEGADGVGSSSGNWHCDSTWLGDRVITTSTRTWALPTHNNHLYKQISNGTSGGSTNDNVYFGYSTPWGYFDFNRFHCHFSPRDRQRLINNNWGFRPKRLSFKLFNIQVKEVTQNEGTKTIANNLTSTIQVFTDSEYQLPYVLGSAHQGCLPPFPADVFMIPQYGYLTLNNGSQAVGRSSFYCLEYFPSQMLRTGNNFSFSYTFEDVPFHSSYAHSQSLDRLMNPLIDQYLYYLSRTQSTEGTAGTQQLLFSQAGPSNMSAQARNWLPGPCYRQQRVSTTLSQNNNSNFAWTGATKYHLNGRDSLVNPGVAMATHKDDEERFFPSSGVLIFGKTGAANKTTLENVLMTNEEEIRPTNPVATEEYGTVSSNLQAANTAAQTQVVNNQGALPGMVWQNRDVYLQGPIWAKIPHTDGNFHPSPLMGGFGLKHPQILIKNTPVPANPPEVFTPAKFASFITQYSTGQVSVEIEWELQKENSKRWNPEIQYTSNFDKQTGVDFAVDSQGVYSEPRPIGTRYLTRNL

SEQ ID NO: 506 - protein, 738 aa, Adeno-associated virus
MAADGYLPDWLEDNLSEGIREWWDLKPGAPKPKANQQKQDDGRGLVLPGYKYLGPFNGLDKGEPVNAADAAALEHDKAYDQQLKAGDNPYLRYNHADAEFQERLQEDTSFGGNLGRAVFQAKKRVLEPLGLVEEGAKTAPGKKRPVEPSPQRSPDSSTGIGKKGQQPARKRLNFGQTGDSESVPDPQPIGEPPAAPSSVGSGTMAAGGGAPMADNNEGADGVGSSSGNWHCDSTWLGDRVITTSTRTWALPTYNNHLYKQISNGTSGGSTNDNTYFGYSTPWGYFDFNRFHCHFSPRDWQRPINNNWGFRPKRLSFKLFNIQVKEVTQNEGTKTIANNLTSTIQVFTDSEYQLPYVLGSAHQGCLPPFPADVFMIPQYGYLTLNNGSQAVGRSSFYCLEYFPSQMLRTGNNFSFSYPFEDVPFHSSYAHSQSLDRLMNPLIDQYLYYLSRTQSTGGTAGTQQLLFSQAGPSNMSAQARNWLPGPCYRQQRVSTTLSQNNNSNFAWTGATKYHLNGRDSLVNPGVAMATNKDDEDRFFPSSGILMFGKQGAGKDNVDYSNVMLTSEEEIKTTNPVATEQYGVVADNLQQQDTAPIVGAVNSQGALPGMVWQNRDVYLQGPIWAKIPHTDGNFHPSPLMGGFGLKHPPPQVLIKNTPVPADPPTAFNQAKLNSFITQYSTGQVSVEIEWELQKENSKRWNPEIQYTSNYYKSTNVDFAVNTEGVYSEPRPIGTRYLTRNL

SEQ ID NO: 507 - DNA, 2217 bp, Adeno-associated virus
atggctgccgatggttatcttccagattggctcgaggacaacctctctgagggcattcgcgagtggtgggacctgaaacctggagccccgaaacccaaggccaaccagcaaaagcaggacgacggccggggtctggtgcttcctggctacaagtacctcggacccttcaacggactcgacaagggggagcccgtcaacgcggcggacgcagcggccctcgagcacgacaaggcctacgaccagcagctcaaagcgggtgacaatccgtacctgcggtataatcacgccgacgccgagtttcaggagcgtctgcaagaagatacgtcttttgggggcaacctcgggcgagcagtcttccaggccaagaagcgggttctcgaacctctcggtctggttgaggaaggcgctaagacggctcctggaaagaagagaccggtagagccgtcaccacagcgttcccccgactcctccacgggcatcggcaagaaaggccagcagcccgccagaaagagactcaatttcggtcagactggcgactcagagtcagtccccgaccctcaacctatcggagaacctccagcagcgccctctagtgtgggatctggtacaatggctgcaggcggtggcgcaccaatggcagacaataacgaaggtgccgacggagtgggtagttcctcgggaaattggcattgcgattccacatggctgggcgacagagtcatcaccaccagcacccgaacctgggccctgcccacctacaacaaccacctctacaagcaaatctccaacgggacctcgggaggcagcaccaacgacaacacctactttggctacagcaccccctgggggtattttgactttaacagattccactgccacttctcaccacgtgactggcagcgacccatcaacaacaactggggattccggcccaagagactcagcttcaagctcttcaacatccaggtcaaagaggtcacgcagaatgaaggcaccaagaccatcgccaataacctcaccagcaccatccaggtgtttacggactcggaataccagctgccgtacgtcctcggctctgcccaccagggctgcctgcctccgttcccggcggacgtcttcatgattcctcagtacggctacctgactctcaacaacggtagtcaggccgtgggacgttcctccttctactgcctggagtacttcccctctcagatgctgagaacgggcaacaacttttccttcagctaccctttcgaggacgtgcctttccacagcagctacgcgcacagccagagtttggacaggctgatgaatcctctcatcgaccagtacctgtactacctgtcaagaacccagtctacgggaggcacagcgggaacccagcagttgctgttttctcaggccgggcctagcaacatgtcggctcaggccagaaactggctgcctggaccctgctacagacagcagcgcgtctccacgacactgtcgcaaaacaacaacagcaactttgcctggactggtgccaccaagtatcatctgaacggcagagactctctggtgaatccgggcgtcgccatggcaaccaacaaggacgacgaggaccgcttcttcccatccagcggcatcctcatgtttggcaagcagggagctggaaaagacaacgtggactatagcaacgtgatgctaaccagcgaggaagaaatcaagaccaccaaccccgtggccacagaacagtatggcgtggtggctgataacctacagcagcaagacaccgctcctattgtgggggccgtcaacagccagggagccttacctggcatggtctggcagaaccgggacgtgtacctgcagggtcctatttgggccaagattcctcacacagatggcaactttcacccgtctcctttaatgggcggctttggacttaaacatccgcctcctcaggtcctcatcaaaaacactcctgttcctgcggatcctccaacagcgttcaaccaggccaagctgaattctttcatcacgcagtacagcaccggacaagtcagcgtggagatcgagtgggagctgcagaaggagaacagcaagcgctggaacccagagattcagtatacttccaactactacaaatctacaaatgtggactttgctgttaatactgagggtgtttactctgagcctcgccccattggcactcgttacctcacccgtaatctgtaa

SEQ ID NO: 508 - DNA, 2214 bp, Adeno-associated virus
atggctgctgacggttatcttccagattggctcgaggacaacctctctgagggcattcgcgagtggtgggacctgaaacctggagcccccaagcccaaggccaaccagcagaagcaggacgacggccggggtctggtgcttcctggctacaagtacctcggacccttcaacggactcgacaagggggagcccgtcaacgcggcggacgcagcggccctcgagcacgacaaggcctacgaccagcagctcaaagcgggtgacaatccgtacctgcggtataaccacgccgacgccgagttccaggagcgtctgcaagaagatacgtcttttgggggcaacctcgggcgagcagtcttccaggccaagaagcgggttctcgaacctctcggtctggctgaggaagctgctaagacggctcctggaaagaagagaccggtagaaccgtcacctcagcgttcccccgactcctccacgggcatcggcaagaaaggccagcagcccgctagaaagagactgaactttgggcagactggcgactcagagtcagtccccgaccctcaaccaatcggagagccaccagcaggcccctctggtctgggatctggtacaatggctgcaggcggtggcgcaccaatggctgacaataacaagggcgccgacggagtgggtaatgcctcaggaaattggcattgcgattccacatggctgggcgacagagtcatcaccaccagcacccgaacctgggctttgcccacctacaacaaccacctctacaagcaaatctccagtcagtcagcaggtagcaccaacgacaacgtctacttcggctacagcaccccctgggggtattttgacttcaacagattccactgtcacttctcaccacgtgactggcagcggctcatcaacaacaactggggattccggcccaagaagctcaacttcaagctgttcaacatccaggtcaaggaggtcacaacgggtgacggcgtcacgaccatcgccaataaccttaccagcacggttcaggtcttttcggactcggaataccagctgccctacgtcctcggctccgcacaccagggctgcctgcctccgttcccggcggacgtcttcatgattccccagtacggctacctgactctgaacaatgacagccaatcggtgggtcgttcctctttctactgcctggaatatttcccttctcaaatgctgagaacgggcaacaacttcaccttcagctacaccttcgaggacgttcccttccacagcagctacgcacacagccagagcctggaccggctgatgaatcctcttatcgaccagtacctgtattacctggccagaacacagagcaacgcaggaggcacagctggcaatcgggaactgcagttttatcagggcgggcctaccaccatggccgaacaagccaaaaactggctgcctggaccttgcttccggcaacaaagagtctccaagacgctggatcaaaacaacaacagcaactttgcttggactggtgccaccaaataccatctaaatggaagaaattcattggttaatcccggtgtcgccatggcaacccacaaggacgacgaggaacgcttcttcccttcgagcggagtcctgatttttggaaaaactggagcagctaataagactacactggaaaatgtgttaatgacaaatgaagaggaaattcgtcctaccaacccggtagccaccgaggaatacgggactgttagcagcaacctgcaggcggctaacactgcagcccagacacaagttgtcaacaaccagggagccttacctggtatggtctggcagaaccgggacgtgtacctgcagggtcccatctgggccaagattcctcacacggacggcaactttcacccgtctccgctgatgggcggctttggactgaagcatccgcctcctcagatcctgatcaaaaacactcctgttcctgctaatcccccggaggtgtttacgcctgccaagtttgcttctttcatcacacagtacagcaccggccaggtcagcgtggagatcgagtgggagctgcagaaggagaacagcaagcgctggaacccagagattcagtatacctccaattttgacaaacagactggtgtggactttgccgttgacagccagggtgtttattctgagcctcgccccattggtactcgttacctcacccgtaatctgtaa

SEQ ID NO: 509 - protein, 737 aa, Adeno-associated virus
MAADGYLPDWLEDNLSEGIREWWDLKPGAPKPKANQQKQDDGRGLVLPGYKYLGPFNGLDKGEPVNAADAAALEHDKAYDQQLKAGDNPYLRYNHADAEFQERLQEDTSFGGNLGRAVFQAKKRVLEPLGLAEEAAKTAPGKKRPVEPSPQRSPDSSTGIGKKGQQPARKRLNFGQTGDSESVPDPQPIGEPPAGPSGLGSGTMAAGGGAPMADNNKGADGVGNASGNWHCDSTWLGDRVITTSTRTWALPTYNNHLYKQISSQSAGSTNDNVYFGYSTPWGYFDFNRFHCHFSPRDWQRLINNNWGFRPKKLNFKLFNIQVKEVTTGDGVTTIANNLTSTVQVFSDSEYQLPYVLGSAHQGCLPPFPADVFMIPQYGYLTLNNDSQSVGRSSFYCLEYFPSQMLRTGNNFTFSYTFEDVPFHSSYAHSQSLDRLMNPLIDQYLYYLARTQSNAGGTAGNRELQFYQGGPTTMAEQAKNWLPGPCFRQQRVSKTLDQNNNSNFAWTGATKYHLNGRNSLVNPGVAMATHKDDEERFFPSSGVLIFGKTGAANKTTLENVLMTNEEEIRPTNPVATEEYGTVSSNLQAANTAAQTQVVNNQGALPGMVWQNRDVYLQGPIWAKIPHTDGNFHPSPLMGGFGLKHPPPQILIKNTPVPANPPEVFTPAKFASFITQYSTGQVSVEIEWELQKENSKRWNPEIQYTSNFDKQTGVDFAVDSQGVYSEPRPIGTRYLTRNL

SEQ ID NO: 510 - DNA, 2217 bp, Adeno-associated virus
atggctgccgatggttatcttccagattggctcgaggacaacctctctgagggcattcgcgagtggtgggacctgaaacctggagccccgaaacccaaagccaaccagcaaaagcaggacgacggccggggtctggtgcttcctggctacaagtacctcggacccttcaacggactcgacaagggggagcccgtcaacgcggcggacgcagcggccctcgagcacgacaaggcctacgaccagcagctcaaagcgggtgacaatccgtacctgcggtataatcacgccgacgccgagtttcaggagcgtctgcaagaagatacgtcttttgggggcaacctcgggcgagcagtcttccaggccaagaagcgggttctcgaacctctcggtctggttgaggaaggcgctaagacggctcctggaaagaagagaccggtagagccgtcaccacagcgttcccccgactcctccacgggcatcggcaagaaaggccagcagcccgccagaaagagactcaatttcggtcagactggcgactcagagtcagtccccgaccctcaacctatcggagaacctccagcagcgccctctagtgtgggatctggtacaatggctgcaggcggtggcgcaccaatggcagacaataacgaaggtgccgacggagtgggtagttcctcgggaaattggcattgcgattccacatggctgggcgacagagtcatcaccaccagcacccgaacctgggccctgcccacctacaacaaccacctctacaagcaaatctccaacgggacctcgggaggcagcaccaacgacaacacctactttggctacagcaccccctgggggtattttgactttaacagattccactgccacttctcaccacgtgactggcagcgactcatcaacaacaactggggattccggcccaagagactcagcttcaagctcttcaacatccaggtcaaagaggtcacgcagaatgaaggcaccaagaccatcgccaataacctcaccagcaccatccaggtgtttacggactcggaataccagctgccgtacgtcctcggctctgcccaccagggctgcctgcctccgttcccggcggacgtcttcatgattcctcagtacggctacctgactctcaacaacggtagtcaggccgtgggacgttcctccttctactgcctggagtacttcccctctcagatgctgagaacgggcaacaacttttccttcagctacactttcgaggacgtgcctttccacagcagctacgcgcacagccagagtttggacaggctgatgaatcctctcatcgaccagtacctgtactacctgtcaagaacccagtctacgggaggcacagcgggaacccagcagttgctgttttctcaggccgggcctagcaacatgtcggctcaggccagaaactggctgcctggaccctgctacagacagcagcgcgtctccacgacactgtcgcaaaacaacaacagcaactttgcctggactggtgccaccaagtatcatctgaacggcagagactctctggtgaatccgggcgtcgccatggcaaccaacaaggacgacgaggaccgcttcttcccatccagcggcatcctcatgtttggcaagcagggagctggaaaagacaacgtggactatagcaacgtgatgctaaccagcgaggaagaaatcaagaccaccaaccccgtggccacagaacagtatggcgtggtggctgataacctacagcagcaaaacaccgctcctattgtgggggccgtcaacagccagggagccttacctggcatggtctggcagaaccgggacgtgtacctgcagggtcctatttgggccaagattcctcacacagatggcaactttcacccgtctcctttaatgggcggctttggacttaaacatccgcctcctcagatcctcatcaaaaacactcctgttcctgcggatcctccaacagcgttcaaccaggccaagctgaattctttcatcacgcagtacagcaccggacaagtcagcgtggagatcgtgtgggagctgcagaaggagaacagcaagcgcaggaacccagagattcagtatacttccaactactacaaatctacaaatgtggactttgctgttaatactgagggtgtttactctgagcctcgccccattggcactcgttacctcacccgtaatctgtaa

SEQ ID NO: 511 - protein, 738 aa, Adeno-associated virus
MAADGYLPDWLEDNLSEGIREWWDLKPGAPKPKANQQKQDDGRGLVLPGYKYLGPFNGLDKGEPVNAADAAALEHDKAYDQQLKAGDNPYLRYNHADAEFQERLQEDTSFGGNLGRAVFQAKKRVLEPLGLVEEGAKTAPGKKRPVEPSPQRSPDSSTGIGKKGQQPARKRLNFGQTGDSESVPDPQPIGEPPAAPSSVGSGTMAAGGGAPMADNNEGADGVGSSSGNWHCDSTWLGDRVITTSTRTWALPTYNNHLYKQISNGTSGGSTNDNTYFGYSTPWGYFDFNRFHCHFSPRDWQRLINNNWGFRPKRLSFKLFNIQVKEVTQNEGTKTIANNLTSTIQVFTDSEYQLPYVLGSAHQGCLPPFPADVFMIPQYGYLTLNNGSQAVGRSSFYCLEYFPSQMLRTGNNFSFSYTFEDVPFHSSYAHSQSLDRLMNPLIDQYLYYLSRTQSTGGTAGTQQLLFSQAGPSNMSAQARNWLPGPCYRQQRVSTTLSQNNNSNFAWTGATKYHLNGRDSLVNPGVAMATNKDDEDRFFPSSGILMFGKQGAGKDNVDYSNVMLTSEEEIKTTNPVATEQYGVVADNLQQQNTAPIVGAVNSQGALPGMVWQNRDVYLQGPIWAKIPHTDGNFHPSPLMGGFGLKHPPPQILIKNTPVPADPPTAFNQAKLNSFITQYSTGQVSVEIVWELQKENSKRRNPEIQYTSNYYKSTNVDFAVNTEGVYSEPRPIGTRYLTRNL

SEQ ID NO: 512 - protein, 738 aa, Adeno-associated virus
MAADGYLPDWLEDNLSEGIREWWDLKPGAPKPKANQQKQDDGRGLVLPGYKYLGPFNGLDKGEPVNAADAAALEHDKAYDQQLKAGDNPYLRYNHADAEFQERLQEDTSFGGNLGRAVFQAKKRVLEPLGLVEEGAKTAPGKKRPVEPSPQRSPDSSTGIGKKGQQPARKRLNFGQTGDSESVPDPQPIGEPPAAPSSVGSGTMAAGGGAPMADNNEGADGVGSSSGNWHCDSTWLGDRVITTSTRTWALPTYNNHLYKQISNGTSGGSTNDNTYFGYSTPWGYFDFNRFHCHFSPRDWQRLINNNWGFRPKRLSFKLFNIQVKEVTQNEGTKTIANNLTSTIQVFTDSEYQLPYVLGSAHQGCLPPFPADVFMIPQYGYLTLNNGSQAVGRSSFYCLEYFPSQMLRTGNNFSFSYTFEDVPFHSSYAHSQSLDRLMNPLIDQYLYYLSRTQSTGGTAGTQQLLFSQAGPSNMSAQARNWLPGPCYRQQRVSTTLSQNNNSNFAWTGATKYHLNGRDSLVNPGVAMATNKDDEDRFFPSSGILMFGKQGAGKDNVDYSNVMLTSEEEIKTTNPVATEQYGVVADNLQQQNTAPIVGAVNSQGALPGMVWQNRDVYLQGPIWAKIPHTDGNFHPSPLMGGFGLKHPPPQILIKNTPVPADPPTAFNQAKLNSFITQYSTGQVSVEIEWELQKENSKRWNPEIQYTSNYYKSTNVDFAVNTEGVYSEPRPIGTRYLTRNL

SEQ ID NO: 513 - protein, 738 aa, Adeno-associated virus
MAADGYLPDWLEDNLSEGIREWWDLKPGAPKPKANQQKQDDGRGLVLPGYKYLGPFNGLDKGEPVNAADAAALEHDKAYDQQLKAGDNPYLRYNHADAEFQERLQEDTSFGGNLGRAVFQAKKRVLEPLGLVEEGAKTAPGKKRPVEPSPQRSPDSSTGIGKKGQQPARKRLNFGQTGDSESVPDPQPIGEPPAAPSSVGSGTMAAGGGAPMADNNEGADGVGSSSGNWHCDSTWLGDRVITTSTRTWALPTYNNHLYKQISNGTSGGSTNDNTYFGYSTPWGYFDFNRFHCHFSPRDWQRLINNNWGFRPKRLSFKLFNIQVKEVTQNEGTKTIANNLTSTIQVFTDSEYQLPYVLGSAHQGCLPPFPADVFMIPQYGYLTLNNGSQAVGRSSFYCLEYFPSQMLRTGNNFSFSYTFEDVPFHSSYAHSQSLDRLMNPLIDQYLYYLSRTQSTGGTAGTQQLLFSQAGPSNMSAQARNWLPGPCYRQQRVSTTLSQNNNSNFAWTGATKYHLNGRDSLVNPGVAMATNKDDEDRFFPSSGILMFGKQGAGKDNVDYSNVMLTSEEEIKTTNPVATEQYGVVADNLQQQNTAPIVGAVNSQGALPGMVWQNRDVYLQGPIWAKIPHTDGNFHPSPLMGGFGLKHPPPQILIKNTPVPADPPTAFNQAKLNSFITQYSTGQVSVEIVWELQKENSKRWNPEIQYTSNYYKSTNVDFAVNTEGVYSEPRPIGTRYLTRNL

SEQ ID NO: 514 - protein, 738 aa, Adeno-associated virus; identical to SEQ ID NO: 512

SEQ ID NO: 515 - DNA, 2214 bp, Adeno-associated virus
atggctgctgacggttatcttccagattggctcgaggacaacctctctgagggcattcgcgagtggtgggacctgaaacctggagcccccaagcccaaggccaaccagcagaagcaggacgacggccggggtctggtgcttcctggctacaagtacctcggacccttcaacggactcgacaagggggagcccgtcaacgcggcggacgcagcggccctcgagcacgacaaggcctacgaccagcagctcaaagcgggtgacaatccgtacctgcggtataaccacgccgacgccgagtttcaggagcgtctgcaagaagatacgtcttttgggggcaacctcgggcgagcagtcttccaggccaagaagcgggttctcgaacctctcggtctggttgaggaagctgctaagacggctcctggaaagaagagaccggtagaaccgtcacctcagcgttcccccgactcctccacgggcatcggcaagaaaggccagcagcccgctagaaagagactgaactttgggcagactggcgactcagagtcagtccccgaccctcaaccaatcggagaaccaccagcaggcccctctggtctgggatctggtacaatggctgcaggcggtggcgctccaatggcagacaataacgaaggcgccgacggagtgggtaatgcctcaggaaattggcattgcgattccacatggctgggcgacagagtcatcaccaccagcacccgaacctgggctttgcccacctacaacaaccacctctacaagcaaatctccagtcagtcagcaggtagcaccaacgacaacgtctacttcggctacagcaccccctgggggtattttgacttcaacagattccactgtcacttctcaccacgtgactggcagcggctcatcaacaacaactggggattccggcccaagaagctcaacttcaagctgttcaacatccaggtcaaggaggtcacaacgaatgacggcgtcacgaccatcgccaataaccttaccagcacggttcaggtcttttcggactcggaataccagctgccctacgtcctcggctccgcacaccagggctgcctgcctccgttcccggcggacgtcttcatgattccccagtacggctacctgactctgaacaatggcagccaatcggtgggtcgttcctctttctactgcctggaatatttcccttctcaaatgctgagaacgggcaacaacttcaccttcagctacaccttcgaggacgttcccttccacagcagctacgcacacagccagagcctggaccggctgatgaatcctcttatcgaccagtacctgtattacctggccagaacacagagcaacgcaggaggcacagctggcaatcgggaactgcagttttatcagggcgggcctaccaccatggccgaacaagccaaaaactggctgcctagaccttgcttccggcaacaaagagtctccaagacgctggatcaaaacaacaacagcaactttgcttggactggtgccaccaaataccatctaaatggaagaaattcattggttaatcccggtgtcgccatggcaacccacaaggacgacgaggaacgcttcttcccttcgagcggagtcctgatttttggaaaaactggagcagctaataagactacactggaaaatgtgttaatgacaaatgaagaggaaattcgtcctaccaacccggtagccaccgaggaatacgggactgttagcagcaacctgcaggcggctaacactgcagcccagacacaagttgtcaacaaccagggagccttacctggtatggtctggcagaaccgggacgtgtacctgcagggtcccatctgggccaagattcctcacacggacggcaactttcacccgtctccgctgatgggcggctttggactgaagcatccgcctcctcagatcctgatcaaaaacactcctgttcctgctaatcccccggaggtgtttacgcctgccaagtttgcttctttcatcacacagtacagcaccggccaggtcagcgtggagatcgagtgggagctgcagaaggagaacagcaagcgctggaacccagagattcagtatacctccaattttgacaaacagactggtgtggactttgccgttgacagccagggtgtttattctgagcctcgccccattggtactcgttacctcacccgtaatctgtaa

SEQ ID NO: 516 - protein, 737 aa, Adeno-associated virus
MAADGYLPDWLEDNLSEGIREWWDLKPGAPKPKANQQKQDDGRGLVLPGYKYLGPFNGLDKGEPVNAADAAALEHDKAYDQQLKAGDNPYLRYNHADAEFQERLQEDTSFGGNLGRAVFQAKKRVLEPLGLVEEAAKTAPGKKRPVEPSPQRSPDSSTGIGKKGQQPARKRLNFGQTGDSESVPDPQPIGEPPAGPSGLGSGTMAAGGGAPMADNNEGADGVGNASGNWHCDSTWLGDRVITTSTRTWALPTYNNHLYKQISSQSAGSTNDNVYFGYSTPWGYFDFNRFHCHFSPRDWQRLINNNWGFRPKKLNFKLFNIQVKEVTTNDGVTTIANNLTSTVQVFSDSEYQLPYVLGSAHQGCLPPFPADVFMIPQYGYLTLNNGSQSVGRSSFYCLEYFPSQMLRTGNNFTFSYTFEDVPFHSSYAHSQSLDRLMNPLIDQYLYYLARTQSNAGGTAGNRELQFYQGGPTTMAEQAKNWLPRPCFRQQRVSKTLDQNNNSNFAWTGATKYHLNGRNSLVNPGVAMATHKDDEERFFPSSGVLIFGKTGAANKTTLENVLMTNEEEIRPTNPVATEEYGTVSSNLQAANTAAQTQVVNNQGALPGMVWQNRDVYLQGPIWAKIPHTDGNFHPSPLMGGFGLKHPPPQILIKNTPVPANPPEVFTPAKFASFITQYSTGQVSVEIEWELQKENSKRWNPEIQYTSNFDKQTGVDFAVDSQGVYSEPRPIGTRYLTRNL

SEQ ID NO: 517 - DNA, 2214 bp, Adeno-associated virus
atggctgctgacggttatcttccagattggctcgaggacaacctctctgagggcattcgcgagtggtgggacctgaaacctggagcccccaagcccaaggccaaccagcagaagcaggacgacggccggggtctggtgcttcctggctacaagtacctcggacccttcaacggactcgacaagggggagcccgtcaacgcggcggacgcagcggccctcgagcacgacaaggcctacgaccagcagctcaaagcgggtgacaatccgtacctgcggtataaccatgccgacgccgagtttcaggagcgtctgcaagaagatacgtcttttgggggcaacctcgggcgagcagtcctccaggccaagaagcgggttctcgaacctctcggtctggttgaggaagctgctaagacggctcctggaaagaagagaccggtagaaccgtcacctcagcgttcccccgactcctccacgggcatcggcaagaaaggccagcagcccgctagaaagagactgaactttgggcagactggcgactcagagtcagtccccgaccctcaaccaatcggagaaccaccagcaggcccctctggtctgggatctggtacaatggctgcaggcggtggcgctccaatggcagacaataacgaaggcgccgacggagtgggtaatgcctcaggaaattggcattgcgattccacatggctgggcgacagagtcatcaccaccagcacccgaacctgggctttgcccacctacaacaaccacctctacaagcaaatctccagtcagtcagcaggtagcaccaacgacaacgtctacttcggctacagcaccccctgggggtattttgacttcaacagattccactgtcacttctcaccacgtgactggcagcggctcatcaacaacaactggggattccggcccaagaagctcaacttcaagctgttcaacatccaggtcaaggaggtcacaacgaatgacggcgtcacgaccatcgccaataaccttaccagcacggttcaggtcttttcggactcggaataccagctgccctacgtcctcggctccgcacaccagggctgcctgcctccgttcccggcggacgtcttcatgattccccagtacggctacctgactctgaacaatggcagccaatcggtgggtcgttcctctttctactgcctggaatatttcccttctcaaatgctgagaacgggcaacaacttcaccttcagctacaccttcgaggacgttcccttccacagcagctacgcacacagccagagcctggaccggctgatgaatcctcttatcgaccagtacctgtattacctggccagaacacagagcaacgcaggaggcacagctggcaatcgggaactgcagttttatcagggcgggcctaccaccatggccgaacaagccaaaaactggctgcctggaccttgcttccggcaacaaagagtctccaagacgctggatcaaaacaacaacagcaactttgcttggactggtgccaccaaataccatctaaatggaagaaattcattggttaatcccggtgtcgccatggcaacccacaaggacgacgaggaacgcttcttcccttcgagcggagtcctgatttttggaaaaactggagcagctaataagactacactggaaaatgtgttaatgacaaatgaagaggaaattcgtcctaccaacccggtagccaccgaggaatacgggactgttagcagcaacctgcaggcggctaacactgcagcccagacacaagttgtcaacaaccagggagccttacctggtatggtctggcagaaccgggacgtgtacctgcagggtcccatctgggccaagattcctcacacggacggcaactttcacccgtctccgctgatgggcggctttggactgaagcatccgcctcctcagatcctgatcaaaaacactcctgttcctgctaatcccccggaggtgtttacgcctgccaagtttgcttctttcatcacacagtacagcaccggccaggtcagcgtggagatcgagtgggagctgcagaaggagaacagcaagcgctggaacccagagattcagtatacctccaattttgacaaacagactggtgtggactttgccgttgacagccagggtgtttattctgagcctcgccccattggtactcgttacctcacccgtaatctgtaa

SEQ ID NO: 518 - protein, 737 aa, Adeno-associated virus; identical to SEQ ID NO: 477

SEQ ID NO: 519 - protein, 737 aa, Adeno-associated virus
MAADGYLPDWLEDNLSEGIREWWDLKPGAPKPKANQQKQDDGRGLVLPGYKYLGPFNGLDKGEPVNAADAAALEHDKAYDQQLKAGDNPYLRYNHADAEFQERLQEDTSFGGNLGRAVLQAKKRVLEPLGLVEEAAKTAPGKKRPVEPSPQRSPDSSTGIGKKGQQPARKRLNFGQTGDSESVPDPQPIGEPPAGPSGLGSGTMAAGGGAPMADNNEGADGVGNASGNWHCDSTWLGDRVITTSTRTWALPTYNNHLYKQISSQSAGSTNDNVYFGYSTPWGYFDFNRFHCHFSPRDWQRLINNNWGFRPKKLNFKLFNIQVKEVTTNDGVTTIANNLTSTVQVFSDSEYQLPYVLGSAHQGCLPPFPADVFMIPQYGYLTLNNGSQSVGRSSFYCLEYFPSQMLRTGNNFTFSYTFEDVPFHSSYAHSQSLDRLMNPLIDQYLYYLARTQSNAGGTAGNRELQFYQGGPTTMAEQAKNWLPGPCFRQQRVSKTLDQNNNSNFAWTGATKYHLNGRNSLVNPGVAMATHKDDEERFFPSSGVLIFGKTGAANKTTLENVLMTNEEEIRPTNPVATEEYGTVSSNLQAANTAAQTQVVNNQGALPGMVWQNRDVYLQGPIWAKIPHTDGNFHPSPLMGGFGLKHPPPQILIKNTPVPANPPEVFTPAKFASFITQYSTGQVSVEIEWELQKENSKRWNPEIQYTSNFDKQTGVDFAVDSQGVYSEPRPIGTRYLTRNL

SEQ ID NO: 520 - DNA, 2217 bp, Adeno-associated virus
atggctgccgatggttatcttccagattggctcgaggacaacctctctgagggcattcgcgagtggtgggacctgaaacctggagccccgaaacccaaagccaaccagcaaaagcaggacgacggccggggtctggtgcttcctggctacaagtacctcggacccttcaacggactcgacaagggggagcccgtcaacgcggcggacgcagcggccctcgagcacgacaaggcctacgaccagcagctcaaagcgggtgacaatccgtacctgcggtataatcacgccgacgccgagtttcaggagcgtctgcaagaagatacgtcttttgggggcaacctcgggcgagcagtcttccaggccaagaagcgggttctcgaacctctcggtctggttgaggaaggcgctaagacggctcctggaaagaagagaccggtagagccgtcaccacagcgttcccccgactcctccacgggcatcggcaagaaaggccagcagcccgccagaaagagactcaatttcggtcagactggcgactcagagtcagtccccgaccctcaacctatcggagaacctccagcagcgccctctagtgtgggatctggtacaatggctgcaggcggtggcgcaccaatggcagacaataacgaaggtgccgacggagtgggtagttcctcgggaaattggcattgcgattccacatggctgggcgacagagtcatcaccaccagcacccgaacctgggccctgcccacctacaacaaccacctctacaagcaaatctccaacgggacctcgggaggcagcaccaacgacaacacctactttggctacagcaccccctgggggtattttgactttaacagattccactgccacttctcaccacgtgactggcagcgactcatcaacaacaactggggattccggcccaagagactcagcttcaagctcttcaacatccaggtcaaagaggtcacgcagaatgaaggcaccaagaccatcgccaataacctcaccagcaccatccaggtgtttacggactcggaataccagctgccgtacgtcctcggctctgcccaccagggctgcctgcctccgttcccggcggacgtcttcatgattcctcagtacggctacctgactctcaacaacggtagtcaggccgtgggacgttcctccttctactgcctggagtacttcccctctcagatgctgagaacgggcaacaacttttccttcagctacactttcgaggacgtgcctttccacagcagctacgcgcacagccagagtttggacaggctgatgaatcctctcatcgaccagtacctgtactacctgtcaagaacccagtctacgggaggcacagcgggaacccagcagttgctgttttctcaggccgggcctagcaacatgtcggctcaggccagaaactggctgcctggaccctgctacagacagcagcgcgtctccacgacactgtcgcaaaacaacaacagcaactttgcctggactggtgccaccaagtatcatctgaacggcagagactctctggtgaatccgggcgtcgccatggcaaccaacaaggacgacgaggaccgcttcttcccacccagcggcatcctcatgtttggcaagcagggagctggaaaagacaacgtggactatagcaacgtgatgctaaccagcgaggaagaaatcaagaccaccaaccccgtggccacagaacagtatggcgtggtggctgataacctacagcagcaaaacaccgctcctattgtgggggccgtcaacagccagggagccttacctggcatggtctggcagaaccgggacgtgtacctgcagggtcctatttgggccaagattcctcacacagatggcaactttcacccgtctcctttaatgggcggctttggacttaaacatccgcctcctcagatcctcatcaaaaacactcctgttcctgcggatcctccaacagcgttcaaccaggccaagctgaattctttcatcacgcagtacagcaccggacaagtcagcgtggtgatcgagtgggagctgcagaaggagaacagcaagcgctggaacccagagattcagtatacttccaactactacaaatctacaaatgtggactttgctgttaatactgagggtgtttactctgagcttcgccccattggcactcgttacctcacccgtaatctgtaa

SEQ ID NO: 521 - protein, 738 aa, Adeno-associated virus
MAADGYLPDWLEDNLSEGIREWWDLKPGAPKPKANQQKQDDGRGLVLPGYKYLGPFNGLDKGEPVNAADAAALEHDKAYDQQLKAGDNPYLRYNHADAEFQERLQEDTSFGGNLGRAVFQAKKRVLEPLGLVEEGAKTAPGKKRPVEPSPQRSPDSSTGIGKKGQQPARKRLNFGQTGDSESVPDPQPIGEPPAAPSSVGSGTMAAGGGAPMADNNEGADGVGSSSGNWHCDSTWLGDRVITTSTRTWALPTYNNHLYKQISNGTSGGSTNDNTYFGYSTPWGYFDFNRFHCHFSPRDWQRLINNNWGFRPKRLSFKLFNIQVKEVTQNEGTKTIANNLTSTIQVFTDSEYQLPYVLGSAHQGCLPPFPADVFMIPQYGYLTLNNGSQAVGRSSFYCLEYFPSQMLRTGNNFSFSYTFEDVPFHSSYAHSQSLDRLMNPLIDQYLYYLSRTQSTGGTAGTQQLLFSQAGPSNMSAQARNWLPGPCYRQQRVSTTLSQNNNSNFAWTGATKYHLNGRDSLVNPGVAMATNKDDEDRFFPPSGILMFGKQGAGKDNVDYSNVMLTSEEEIKTTNPVATEQYGVVADNLQQQNTAPIVGAVNSQGALPGMVWQNRDVYLQGPIWAKIPHTDGNFHPSPLMGGFGLKHPPPQILIKNTPVPADPPTAFNQAKLNSFITQYSTGQVSVVIEWELQKENSKRWNPEIQYTSNYYKSTNVDFAVNTEGVYSELRPIGTRYLTRNL

SEQ ID NO: 522 - DNA, 2214 bp, Adeno-associated virus
atggctgctgacggttatcttccagattggctcgaggacaacctctctgagggcattcgcgagtggtgggacctgaaacctggagcccccaagcccaaggccaaccagcagaagcaggacgacggccggggtctggtgcttcctggctacaagtacctcggacccttcaacggactcgacaagggggagcccgtcaacgcggcggacgcagcggccctcgagcacgacaaggcctacgaccagcagctcaaagcgggtgacaatccgtacctgcggtataaccacgccgacgccgagtttcaggagcgtctgcaagaagatacgtcttttgggggcaacctcgggcgagcagtcttccaggccaagaagcgggttctcgaacctctcggtctggttgaggaagctgctaagacggctcctggaaagaagagaccggtagaaccgtcacctcagcgttcccccgactcctccacgggcatcggcaagaaaggccagcagcccgctagaaagagactgaactttgggcagactggcgactcagagtcagtccccgaccctcaaccaatcggagaaccaccagcaggcccctctggtctgggatctggtacaatggctgcaggcggtggcgccccaatggcagacaataacgaaggcgccgacggagtgggtaatgcctcaggaaattggcattgcgattccacatggctgggcgacagagtcatcaccaccagcacccgaacctgggctttgcccacctacaacaaccacctctacaagcaaatctccagtcagtcagcaggtagcaccaacgacaacgtctacttcggctacagcaccccctgggggtattttgacttcaacagattccactgtcacttctcaccacgtgactggcagcggctcatcaacaacaactggggattccggcccaagaagctcaacttcaagctgttcaacatccaggtcaaggaggtcacaacgaatgacggcgtcacgaccatcgccaataaccttaccagcacggttcaggtcttttcggactcggaataccagctgccctacgtcctcggctccgcacaccagggctgcctgcctccgttcccggcggacgtcttcatgattccccagtacggctacctgactctgaacaatggcagccaatcggtgggtcgttcctctttctactgcctggaatatttcccttctcaaatgctgagaacgggcaacaacttcaccatcagctacaccttcgaggacgttcccttccacagcagctacgcacacagccagagcctggaccggctgatgaatcctcttatcgaccagtacctgtattacctggccagaacacagagcaacgcaggaggcacagctggcaatcaggaactgcagttttatcagggcgggcctaccaccatggccgaacaagccaaaaactggctgcctggaccttgcttccggcaacaaagagtctccaagacgctggatcaaaacaacaacagcaactttgcttggactggtgccaccaaataccatctaaatggaagaaattcattggttaatcccggtgtcgccatggcaacccacaaggacgacgaggaacgcttcttcccttcgagcggagtcctgatttttggaaaaactggagcagctaataagactacactggaaaatgtgttaatgacaaatgaagaggaaattcgtcctaccaacccggtagccaccgaggaatacgggactgttagcagcaacctgcaggcggctaacactgcagcccagacacaagttgtcaacaaccagggagccttacctggtatggtctggcagaaccgggacgtgtacctgcagggtcccatctgggccaagattcctcacacagatggcaactttcacccgtctcctttaatgggcggctttggacttaaacatccgcctcctcagatcctcatcaaaaacactcctgttcctgcggatcctccaacagcgttcaaccaggccaagctgaattctttcatcacgcagtacagcaccggacaagtcagcgtggagatcgagtgggagctgcagaaggagaacagcaagcgctggaacccagagattcagtatacttccaactactacaaatctacaaatgtggactttgctgttaatactgagggtgtttactctgagcctcgccccattggcactcgttacctcacccgtaatctgtaa

SEQ ID NO: 523 - protein, 737 aa, Adeno-associated virus
MAADGYLPDWLEDNLSEGIREWWDLKPGAPKPKANQQKQDDGRGLVLPGYKYLGPFNGLDKGEPVNAADAAALEHDKAYDQQLKAGDNPYLRYNHADAEFQERLQEDTSFGGNLGRAVFQAKKRVLEPLGLVEEAAKTAPGKKRPVEPSPQRSPDSSTGIGKKGQQPARKRLNFGQTGDSESVPDPQPIGEPPAGPSGLGSGTMAAGGGAPMADNNEGADGVGNASGNWHCDSTWLGDRVITTSTRTWALPTYNNHLYKQISSQSAGSTNDNVYFGYSTPWGYFDFNRFHCHFSPRDWQRLINNNWGFRPKKLNFKLFNIQVKEVTTNDGVTTIANNLTSTVQVFSDSEYQLPYVLGSAHQGCLPPFPADVFMIPQYGYLTLNNGSQSVGRSSFYCLEYFPSQMLRTGNNFTISYTFEDVPFHSSYAHSQSLDRLMNPLIDQYLYYLARTQSNAGGTAGNQELQFYQGGPTTMAEQAKNWLPGPCFRQQRVSKTLDQNNNSNFAWTGATKYHLNGRNSLVNPGVAMATHKDDEERFFPSSGVLIFGKTGAANKTTLENVLMTNEEEIRPTNPVATEEYGTVSSNLQAANTAAQTQVVNNQGALPGMVWQNRDVYLQGPIWAKIPHTDGNFHPSPLMGGFGLKHPPPQILIKNTPVPADPPTAFNQAKLNSFITQYSTGQVSVEIEWELQKENSKRWNPEIQYTSNYYKSTNVDFAVNTEGVYSEPRPIGTRYLTRNL

SEQ ID NO: 524 - DNA, 2217 bp, Adeno-associated virus
atggctgccgatggttatcttccagattggctcgaggacaacctctctgagggcattcgcgagtggtgggacctgaaacctggagccccgaaacccaaagccaaccagcaaaagcaggacgacggccggggtctggtgcttcctggctacaagtacctcggacccttcaacggactcgacaagggggagcccgtcaacgcggcggacgcagcggccctcgagcacgacaaggcctacgaccagcagctcaaagcgggtgacaatccgtacctgcggtataatcacgccgacgccgagtttcaggagcgtctgcaagaagatacgtcttttgggggcaacctcgggcgagcagtcttccaggccaagaagcgggttctcgaacctctcggtctggttgaggaaggcgctaagacggctcctggaaagaagagaccggtagagccgtcaccacagcgttcccccgactcctccacgggcatcggcaagaaaggccagcagcccgccagaaagagactcaatttcggtcagactggcgactcagagtcagtccccgaccctcaacctatcggagaacctccagcagcgccctctagtgtgggatctggtacaatggctgcaggcggtggcgcaccaatggcagacaataacgaaggtgccgacggagtgggtagttcctcgggaaattggcattgcgattccacatggctgggcgacagagtcatcaccaccagcacccgaacctgggccctgcccgcctacaacaaccacctctacaagcaaatctccaacgggacctcgggaggcagcaccaacgacaacacctactttggctacagcaccccctgggggtattttgactttaacagattccactgccacttctcaccacgtgactggcagcgactcatcaacaacaactggggattccggcccaagagactcagcttcaagctcttcaacatccaggtcaaagaggtcacgcagaatgaaggcaccaagaccatcgccaataacctcaccagcaccatccaggtgtttacggactcggaataccagctgccgtacgtcctcggctctgcccaccagggctgcctgcctccgttcccggcggatgtcttcatgattcctcagtacggctacctgactctcaacaacggtagtcaggccgtgggacgttcctccttctactgcctggagtacttcccctctcagatgctgagaacgggcaacaacttttccttcagctacactttcgaggacgtgcctttccacagcagctacgcgcacagccagagtttggacaggctgatgaatcctctcatcgaccagtacctgtactacctgtcaagaacccagtctacgggaggcacagcgggaacccagcagttgctgttttctcaggccgggcctagcaacatgtcggctcaggccagaaactggctgcctggaccctgctacagacagcagcgcgtctccacgacactgtcgcaaaacaacaacagcaactttgcctggactggtgccaccaagtatcatctgagcggcagagactctctggtgaatccgggcgtcgccatggcaaccaacaaggacgacgaggaccgcttcttcccatccagcggcatcctcatgtttggcaagcagggagctggaaaagacaacgtggactatagcaacgtgatgctaaccagcgaggaagaaatcaagaccaccaaccccgtggccacagaacagtatggcgtggtggctgataacctacagcagcaaaacaccgctcctattgtgggggccgtcaacagccagggagccttacctggcatggtctggcagaaccgggacgtgtacctgcagggtcctatttgggccaagattcctcacacagatggcaactttcacccgtctcctttaatgggcggctttggacttaaacatccgcctcctcagatcctcatcaaaaacactcctgttcctgcggatcctccaacagcgttcaaccaggccaagctgaattcttccatcacgcagtacagcaccggacaagtcagcgtggagatcgagtgggagctgcagaaggagaacagcaagcgctggaacccagagattcagtatacttccaactactacaaatctacaaatgtggactttgctgttaatactgagggtgtttactctgagcctcgccccattggcactcgttacctcacccgtaatttgtaa

SEQ ID NO: 525 - protein, 738 aa, Adeno-associated virus
MAADGYLPDWLEDNLSEGIREWWDLKPGAPKPKANQQKQDDGRGLVLPGYKYLGPFNGLDKGEPVNAADAAALEHDKAYDQQLKAGDNPYLRYNHADAEFQERLQEDTSFGGNLGRAVFQAKKRVLEPLGLVEEGAKTAPGKKRPVEPSPQRSPDSSTGIGKKGQQPARKRLNFGQTGDSESVPDPQPIGEPPAAPSSVGSGTMAAGGGAPMADNNEGADGVGSSSGNWHCDSTWLGDRVITTSTRTWALPAYNNHLYKQISNGTSGGSTNDNTYFGYSTPWGYFDFNRFHCHFSPRDWQRLINNNWGFRPKRLSFKLFNIQVKEVTQNEGTKTIANNLTSTIQVFTDSEYQLPYVLGSAHQGCLPPFPADVFMIPQYGYLTLNNGSQAVGRSSFYCLEYFPSQMLRTGNNFSFSYTFEDVPFHSSYAHSQSLDRLMNPLIDQYLYYLSRTQSTGGTAGTQQLLFSQAGPSNMSAQARNWLPGPCYRQQRVSTTLSQNNNSNFAWTGATKYHLSGRDSLVNPGVAMATNKDDEDRFFPSSGILMFGKQGAGKDNVDYSNVMLTSEEEIKTTNPVATEQYGVVADNLQQQNTAPIVGAVNSQGALPGMVWQNRDVYLQGPIWAKIPHTDGNFHPSPLMGGFGLKHPPPQILIKNTPVPADPPTAFNQAKLNSSITQYSTGQVSVEIEWELQKENSKRWNPEIQYTSNYYKSTNVDFAVNTEGVYSEPRPIGTRYLTRNL

SEQ ID NO: 526 - protein, 736 aa, Adeno-associated virus; identical to SEQ ID NO: 26

SEQ ID NO: 527 - DNA, 2217 bp, Adeno-associated virus
atggctgctgacggttatcttccagattggctcgaggacaacctctctgagggcattcgcgagtggtgggacctgaaacctggagcccccaagcccaaggccaaccagcagaagcaggacgacggccggggtctggtgcttcctggctacaagtacctcggacccttcaacggactcgacaagggggagcccgtcaacgcggcggacgcagcggccctcgagcacgacaaggcctacgaccagcagctcaaagcgggtgacaatccgtacctgcggtataaccacgccgacgccgagtttcaggagcgtctgcaagaagatacgtcttttgggggcaacctcgggcgagcagtcttccaggccaagaagcgggttctcgaacctctcggtctggttgaggaagctgctaagacggctcctggaaagaagagaccggtagaaccgtcacctcagcgttcccccgactcctccacgggcatcggcaagaaaggccagcagcccgctaaaaagagactgaactttggtcagactggcgactcagagtcagtccccgaccctcaaccaatcggagaaccaccagcaggcccctctggtctgggatctggtacaatggctgcaggcggtggcgctccaatggcagacaataacgaaggcgccgacggagtgggtagttcctcaggaaattggcattgcgattccacatggctgggcgacagagtcatcaccaccagcacccgaacctgggccctgcccacctacaacaaccacctctacaagcaaatatccaatgggacatcgggaggaagcaccaacgacaacacctacttcggctacagcaccccctgggggtattttgacttcaacagattccactgccacttctcaccacgtgactggcagcgactcatcaacaacaactggggattccggccaaaaagactcagcttcaagctcttcaacatccaggtcaaggaggtcacgcagaatgaaggcaccaagaccatcgccaataaccttaccagcacgattcaggtatttacggactcggaataccagctgccgtacgtcctcggctccgcgcaccagggctgcctgcctccgttcccggcggacgtcttcatgattccccagtacggctaccttacactgaacaatggaagtcaagccgtaggccgttcctccttctactgcctggaatattttccatctcaaatgctgcgaactggaaacaattttgaattcagctacaccttcgaggacgtgcctttccacagcagctacgcacacagccagagcttggaccgactgatgaatcctctcatcgaccagtacctgtactacttatccagaactcagtccacaggaggaactcaaggtacccagcaattgttattttctcaagctgggcctgcaaacatgtcggctcaggctaagaactggctacctggaccttgctaccggcagcagcgagtctctacgacactgtcgcaaaacaacaacagcaactttgcttggactggtgccaccaaatatcacctgaacggaagagactctttggtaaatcccggtgtcgccatggcaacccacaaggacgacgaggaacgcttcttcccgtcgagtggagtcctgatgtttggaaaacagggtgctggaagagacaatgtggactacagcagcgttatgctaaccagcgaagaagaaattaaaaccactaaccctgtagccacagaacaatacggtgtggtggctgacaacttgcagcaaaccaatacagggcctattgtgggaaatgtcaacagccaaggagccttacctggcatggtctggcagaaccgagacgtgtacctgcagggtcccatctgggccaagattcctcacacggacggcaacttccacccttcaccgctaatgggaggatttggactgaagcacccacctcctcagatcctgatcaagaacacgccggtacctgcggatcctccaacaacgttcagccaggcgaaattggcttccttcattacgcagtacagcaccggacaggtcagcgtggaaatcgagtgggagctgcagaaggagaacagcaaacgctggaacccagagattcagtacacttcaaactactacaaatctacaaatgtggactttgctgtcaatacagagggaacttattctgagcctcgccccattggtactcgttacctcacccgtaatctgtaa

SEQ ID NO: 528 - protein, 738 aa, Adeno-associated virus
MAADGYLPDWLEDNLSEGIREWWDLKPGAPKPKANQQKQDDGRGLVLPGYKYLGPFNGLDKGEPVNAADAAALEHDKAYDQQLKAGDNPYLRYNHADAEFQERLQEDTSFGGNLGRAVFQAKKRVLEPLGLVEEGAKTAPGKKRPVEPSPQRSPDSSTGIGKKGQQPARKRLNFGQTGDSESVPDPQPLGEPPAAPSSVGSGTMAAGGGAPMADNNEGADGVGSSSGNWHCDSTWLGDRVITTSTRTWALPTYNNHLYKQISNGTSGGSTNDNTYFGYSTPWGYFDFNRFHCHFSPRDWQRLINNNWGFRPKRLSFKLFNIQVKEVTQNEGTKTIANNLTSTIQVFTDSEYQLPYVLGSAHQGCLPPFPADVFMIPQYGYLTLNNGSQAVGRSSFYCLEYFPSQMLRTGNNFSFSYTFEDVPFHSSYAHSQSLDRLMNPLIDQYLYYLSRTQSTGGTAGTQQLLFSQAGPSNMSAQARNWLPGPCYRQQRVSTTLSQNNNSNFAWTGATKYHLNGRDSLVNPGVAMATNKDDEDRFFPSSGILMFGKQGAGKDNVDYSNVMLTSEEEIKTTNPVATEQYGVVADNLQRQNTAPIVGAVNSQGALPGMVWQNRDVYLQGPIWAKIPHTDGNFHPSPLMGGFGLKHPPPQILIKNTPVPADPPTAFNQAKLNSFITQYSTGQVSVEIEWELQKENSKRWNPEIQYTSNYYKSTNVDFAVNTEGVYSEPRPIGTRYLTRNL

SEQ ID NO: 529 - protein, 736 aa, Adeno-associated virus
MAADGYLPDWLEDNLSEGIREWLNLKPGAPQPKANQQKQDNARGLVLPGYKYLGPFNGLDKGDPVNEADAAALEHDKAYGQQLKAGDNPYLKYNHADAEFQERLQKDTSFGGNLGKAVFQAKKRILEPLGLVETPAKTAPGKKRPVDPSPQRSPDSSSGIGKKSPHPARKRLNFGQTGEAESVPDPQPIGEPPSDPSSVGSGTMAAGGGAPMADNNEGADGVGNSSGNWHCDSTWLGDRVITTSTRTWALPTYNNHLYKQISSQSGATNDNHYFGYSTPWGYFDFNRFHCHFSPRDWQRLINNNWGFRPKRLSFKLFNIQVKEVTQNDGTTTIANNLTSTVQVFTDSEYQLPYVLGSAHQGCLPPFPADVFMIPQYGYLTLNNGSQAVGRSSFYCLEYFPSQMLRTGNNFQFSYTFEDVPFHSSYAHSQSLDRLMNPLIDQYLYYLSKTQGTNATVQGAKLQFSQAGPSNMRDQARNWLPGPCYRQQRVSKTANDNNNSEYAWTGATKYHLNGRDSLVNPGPAMASHKDDEEKFFPMNGTLVFGKNGAGNSNVDIENVMITDEEEIRTTNPVATEQYGVVSDNLQSSNTRPITGDVDSQGVLPGMVWQDRDVYLQGPIWAKIPHTDGHFHPSPLMGGFGLKHPPPQILIKNTPVPANPATTFTPGKFASFITQYSTGQVSVQIEWELQKENSKRWNPEIQYTSNYNKSVNVDFTVDTNGVYSEPRPIGTRYLTRNL

SEQ ID NO: 530 - protein, 736 aa, Adeno-associated virus; identical to SEQ ID NO: 105

SEQ ID NO: 531 - protein, 736 aa, Adeno-associated virus
MAADGYLPDWLEDNLSEGIREWWDLKPGAPKPKANQQKQDDGRGLVLPGYKYLGPFNGLDKGEPVNAADAAALEHDKAYDQQLKAGDNPYLRYNHADAEFQERLQEDTSFGGNLGRAVFQAKKRVLEPLGLVEEGAKTAPGKKRPVEQSPQEPDSSSGIGKTGQQPAKKRLNFGQTGDSESVPDPQPLGEPPAAPSGLGPNTMASGGGAPMADNNEGADGVGNSSGNWHCDSTWLGDRVITTSTRTWALPTYNNHLYKQISNGTSGGSTNDNTYFGYSTPWGYFDFNRFHCHFSPRDWQRLINNNWGFRPKRLNFKLFNIQVKEVTTNEGTKTIANNLTSTVQVFTDSEYQLPYVLGSAHQGCLPPFPADVFMVPQYGYLTLNNGSQALGRSSFYCLEYFPSQMLRTGNNFQFSYTFEDVPFHSSYAHSQSLDRLMNPLIDQYLYYLVRTQTTGTGGTQTLAFSQAGPSSMANQARNWVPGPCYRQQRVSTTTNQNNNSNFAWTGAAKFKLNGRDSLMNPGVAMASHKDDEDRFFPSSGVLIFGKQGAGNDGVDYSQVLITDEEEIKATNPVATEEYGAVAINNQAANTQAQTGLVHNQGVIPGMVWQNRDVYLQGPIWAKIPHTDGNFHPSPLMGGFGLKHPPPQILIKNTPVPADPPLTFNQAKLNSFITQYSTGQVSVEIEWELQKENSKRWNPEIQYTSNYYKSTNVDFAVNTEGVYSEPRPIGTRYLTRNL

SEQ ID NO: 532 - protein, 736 aa, Artificial Sequence; identical to SEQ ID NO: 531
  Description of Artificial Sequence: Synthetic polypeptide

SEQ ID NO: 533 - protein, 736 aa, Artificial Sequence
  Description of Artificial Sequence: Synthetic polypeptide
MAADGYLPDWLEDNLSEGIREWWDLKPGAPKPKANQQKQDDGRGLVLPGYKYLGPFNGLDKGEPVNAADAAALEHDKAYDQQLKAGDNPYLRYNHADAEFQERLQEDTSFGGNLGRAVFQAKKRVLEPLGLVEEGAKTAPGKKRPVEQSPQEPDSSSGIGKTGQQPAKKRLNFGQTGDSESVPDPQPLGEPPAAPSGLGPNTMASGGGAPMADNNEGADGVGNSSGNWHCDSTWLGDRVITTSTRTWALPTYNNHLYKQISNGTSGGSTNDNTYFGYSTPWGYFDFNRFHCHFSPRDWQRLINNNWGFRPKRLNFKLFNIQVKEVTTNEGTKTIANNLTSTVQVFTDSEYQLPYVLGSAHQGCLPPFPADVFMVPQYGYLTLNNGSQALGRSSFYCLEYFPSQMLRTGNNFQFSYTFEDVPFHSSYAHSQSLDRLMNPLIDQYLYYLVRTQTTGTGGTQTLAFSQAGPSSMANQARNWVPGPCYRQQRVSTTTNQNNNSNFAWTGAAKFKLNGRDSLMNPGVAMASHKDDEDRFFPSSGVLIFGKQGAGNDGVDYSQVLITDEEEIKATNPVATEEYGAVAINNQRANTQAQTGLVHNQGVIPGMVWQNRDVYLQGPIWAKIPHTDGNFHPSPLMGGFGLKHPPPQILIKNTPVPADPPLTFNQAKLNSFITQYSTGQVSVEIEWELQKENSKRWNPEIQYTSNYYKSTNVDFAVNTEGVYSEPRPIGTRYLTRNL

SEQ ID NO: 534 - protein, 736 aa, Artificial Sequence
  Description of Artificial Sequence: Synthetic polypeptide
MAADGYLPDWLEDNLSEGIREWWDLKPGAPKPKANQQKQDDGRGLVLPGYKYLGPFNGLDKGEPVNAADAAALEHDKAYDQQLKAGDNPYLRYNHADAEFQERLQEDTSFGGNLGRAVFQAKKRVLEPLGLVEEGAKTAPGKKRPVEQSPQEPDSSSGIGKTGQQPAKKRLNFGQTGDSESVPDPQPLGEPPAAPSGLGPNTMASGGGAPMADNNEGADGVGNSSGNWHCDSTWLGDRVITTSTRTWALPTYNNHLYKQISNGTSGGSTNDNTYFGYSTPWGYFDFNRFHCHFSPRDWQRLINNNWGFRPKRLNFKLFNIQVKEVTTNEGTKTIANNLTSTVQVFTDSEYQLPYVLGSAHQGCLPPFPADVFMVPQYGYLTLNNGSQALGRSSFYCLEYFPSQMLRTGNNFQFSYTFEDVPFHSSYAHSQSLDRLMNPLIDQYLYYLVRTQTTGTGGTQTLAFSQAGPSSMANQARNWVPGPCYRQQRVSTTTNQNNNSNFAWTGAAKFKLNGRDSLMNPGVAMASHKDDEDAFFPSSGVLIFGKQGAGNDGVDYSQVLITDEEEIKATNPVATEEYGAVAINNQAANTQAQTGLVHNQGVIPGMVWQNRDVYLQGPIWAKIPHTDGNFHPSPLMGGFGLKHPPPQILIKNTPVPADPPLTFNQAKLNSFITQYSTGQVSVEIEWELQKENSKRWNPEIQYTSNYYKSTNVDFAVNTEGVYSEPRPIGTRYLTRNL

SEQ ID NO: 535 - DNA, 1803 bp, Bovine adeno-associated virus
acggcgcctgcggcaaaaaagaggcctctagagcagagtcctcaagagccagactcctcgagcggagttggcaagaaaggcaaacagcctgccagaaagagactcaactttgacgacgaacctggagccggagacgggcctcccccagaaggaccatcttccggagctatgtctactgagactgaaatgcgtgcagcagctggcggaaatggtggcgatgcgggacaaggtgccgagggagtgggtaatgcctccggtgattggcattgcgattccacttggtcagagagccacgtcaccaccacctcaacccgcacctgggtcctgccgacctacaacaaccacctgtacctgcggctcggctcgagcaacgccagcgacaccttcaacggattctccaccccctggggatactttgactttaaccgcttccactgccacttctcgccaagagactggcaaaggctcatcaacaaccactggggactgcgccccaaaagcatgcaagtccgcatcttcaacatccaagttaaggaggtcacgacgtctaacggggagacgaccgtatccaacaacctcaccagcacggtccagatctttgcggacagcacgtacgagctcccgtacgtgatggatgcaggtcaggagggcagcttgcctcctttccccaacgacgtgttcatggtgcctcagtacgggtactgcggactggtaaccggaggcagctctcaaaaccagacagacagaaatgccttctactgtctggagtactttcccagccagatgctgagaaccggaaacaactttgagatggtgtacaagtttgaaaacgtgcccttccactccatgtacgctcacagccagagcctggataggctgatgaacccgctgctggaccagtacctgtgggagctccagtctaccacctctggaggaactctcaaccagggcaattcagccaccaactttgccaagctgaccaaaacaaacttttctggctaccgcaaaaactggctcccggggcccatgatgaagcagcagagattctccaagactgccagtcaaaactacaagattccccagggaagaaacaacagtctgctccattatgagaccagaactaccctcgacggaagatggagcaattttgccccgggaacggccatggcaaccgcagccaacgacgccaccgacttctctcaggcccagctcatctttgcggggcccaacatcaccggcaacaccaccacagatgccaataacctgatgttcacttcagaagatgaacttagggccaccaacccccgggacactgacctgtttggccacctggcaaccaaccagcaaaacgccaccaccgttcctaccgtagacgacgtggacggagtcggcgtgtacccgggaatggtgtggcaggacagagacatttactaccaagggcccatttgggccaaaattccacacacggatggacactttcacccgtctcctctcattggcggatttggactgaaaagcccgcctccacaaatattcatcaaaaacactcctgtacccgccaatcccgcaacgaccttctctccggccagaatcaacagcttcatcacccagtacagcaccggacaggtggctgtcaaaatagaatgggaaatccagaaggagcggtccaagagatggaacccagaggtccagttcacgtccaactacggagcacaggactcgcttctctgggctcccgacaacgccggagcctacaaagagcccagggccattggatcccgatacctcaccaaccacctctag

SEQ ID NO: 536 - DNA, 1617 bp, Bovine adeno-associated virus
atgcgtgcagcagctggcggaaatggtggcgatgcgggacaaggtgccgagggagtgggtaatgcctccggtgattggcattgcgattccacttggtcagagagccacgtcaccaccacctcaacccgcacctgggtcctgccgacctacaacaaccacctgtacctgcggctcggctcgagcaacgccagcgacaccttcaacggattctccaccccctggggatactttgactttaaccgcttccactgccacttctcgccaagagactggcaaaggctcatcaacaaccactggggactgcgccccaaaagcatgcaagtccgcatcttcaacatccaagttaaggaggtcacgacgtctaacggggagacgaccgtatccaacaacctcaccagcacggtccagatctttgcggacagcacgtacgagctcccgtacgtgatggatgcaggtcaggagggcagcttgcctcctttccccaacgacgtgttcatggtgcctcagtacgggtactgcggactggtaaccggaggcagctctcaaaaccagacagacagaaatgccttctactgtctggagtactttcccagccagatgctgagaaccggaaacaactttgagatggtgtacaagtttgaaaacgtgcccttccactccatgtacgctcacagccagagcctggataggctgatgaacccgctgctggaccagtacctgtgggagctccagtctaccacctctggaggaactctcaaccagggcaattcagccaccaactttgccaagctgaccaaaacaaacttttctggctaccgcaaaaactggctcccggggcccatgatgaagcagcagagattctccaagactgccagtcaaaactacaagattccccagggaagaaacaacagtctgctccattatgagaccagaactaccctcgacggaagatggagcaattttgccccgggaacggccatggcaaccgcagccaacgacgccaccgacttctctcaggcccagctcatctttgcggggcccaacatcaccggcaacaccaccacagatgccaataacctgatgttcacttcagaagatgaacttagggccaccaacccccgggacactgacctgtttggccacctggcaaccaaccagcaaaacgccaccaccgttcctaccgtagacgacgtggacggagtcggcgtgtacccgggaatggtgtggcaggacagagacatttactaccaagggcccatttgggccaaaattccacacacggatggacactttcacccgtctcctctcattggcggatttggactgaaaagcccgcctccacaaatattcatcaaaaacactcctgtacccgccaatcccgcaacgaccttctctccggccagaatcaacagcttcatcacccagtacagcaccggacaggtggctgtcaaaatagaatgggaaatccagaaggagcggtccaagagatggaacccagaggtccagttcacgtccaactacggagcacaggactcgcttctctgggctcccgacaacgccggagcctacaaagagcccagggccattggatcccgatacctcaccaaccacctctag

SEQ ID NO: 537 - DNA, 1173 bp, Bovine adeno-associated virus
atggcgctggtaagctggctggtggaacatggcatcacttccgagaagcagtggattcaggagaatcaggagagctacctgtccttcaactccacgggaaactctcggagccagattaaagccgcgcttgacaacgcgtcaaaaattatgagtctgaccaaatctgcctcagactatctcgtgggacagactgttccagaggacatttctgaaaacagaatctggcagatttttgatctcaacggctacgacccggcatacgcgggctctgttctctacggctggtgcactcgcgcctttggaaagaggaacaccgtctggctgtatggacccgcgaccaccggaaagaccaacatcgcggaagccatctctcacaccgtgcccttttatggctgtgtgaactggactaatgagaactttccctttaatgactgtgtggaaaaaatgttgatctggtgggaggagggaaagatgaccagcaaggtggtggaacccgccaaggccatcttgggggggtctagagtacgagtggatcaaaaatgtaaatcctctgtacaagtagactctaccccggtgattatcacctccaatactaacatgtgtgtggtggtggatgggaactccacgacctttgaacaccagcagccgctggaagaccgcatgttcagatttgaactcatgcggcggctcccgccagattttggcaagattaccaagcaggaagtcaaagacttttttgcttgggcaaaggtcaaccaggtgccggtgactcacgagtttatggttcccaagaaagtggcgggaactgagagggcggagacttctagaaaacgcccactggatgacgtcaccaataccaactataaaagtccggagaagcgggcccggctctcagttgttcctgagacgcctcgcagttcagacgtgcctgtagagcccgctcctctgcgacctctcaactggtcttccaggtatgaatgcagatgtgactatcatgctaaatttgactctgtaacgggggaatgtgacgagtgtgaatatttgaatcggggcaaaaatggctgtatctttcataatgctacacattgtcaaatttgtcacgctgttcctccatgggaaaaggaaaatgtgtcagattttaatgattttgatgactgtaataaagagcagtaa

SEQ ID NO: 538 - DNA, 1833 bp, Bovine adeno-associated virus
atggctaccttctatgaagtcattgttcgcgttccatttgatgtggaagagcacctgcctggaatttctgacaactttgtagactgggtaactggtcaaatttgggagctgcctcccgagtcagatttgaatttgactctgattgagcagcctcagctgacggtggctgacagaattcgccgcgtgttcctgtacgagtggaacaaattttccaagcaggagagcaaattctttgtgcagtttgaaaagggatctgaatattttcatctgcacacgctcgtggagacctccggcatctcttctatggtccttggccgctacgtgagtcagattcgcgcccagctggtgaaggtggtgttccagaacattgagccgcggattaacgactgggtcgccatcaccaaggtaaagaagggcggagccaataaggtggtggattctgggtatattcccgcctacctgctgccgaaggtccaaccagagcttcagtgggcgtggactaacctcgaagagtataaattggccgccctcaatctggaggagcgcaaacggctcgtcgctcagtttcagcttgagtcctcgcagcgctcgcaagaggcatcttcccagagggacgtttcggctgacccggtcatcaagagcaagacttcccagaaatacatggcgctggtaagctggctggtggaacatggcatcacttccgagaagcagtggattcaggagaatcaggagagctacctgtccttcaactccacgggaaactctcggagccagattaaagccgcgcttgacaacgcgtcaaaaattatgagtctgaccaaatctgcctcagactatctcgtgggacagactgttccagaggacatttctgaaaacagaatctggcagatttttgatctcaacggctacgacccggcatacgcgggctctgttctctacggctggtgcactcgcgcctttggaaagaggaacaccgtctggctgtatggacccgcgaccaccggaaagaccaacatcgcggaagccatctctcacaccgtgcccttttatggctgtgtgaactggactaatgagaactttccctttaatgactgtgtggaaaaaatgttgatctggtgggaggagggaaagatgaccagcaaggtggtggaacccgccaaggccatcttgggggggtctagagtacgagtggatcaaaaatgtaaatcctctgtacaagtagactctaccccggtgattatcacctccaatactaacatgtgtgtggtggtggatgggaactccacgacctttgaacaccagcagccgctggaagaccgcatgttcagatttgaactcatgcggcggctcccgccagattttggcaagattaccaagcaggaagtcaaagacttttttgcttgggcaaaggtcaaccaggtgccggtgactcacgagtttatggttcccaagaaagtggcgggaactgagagggcggagacttctagaaaacgcccactggatgacgtcaccaataccaactataaaagtccggagaagcgggcccggctctcagttgttcctgagacgcctcgcagttcagacgtgcctgtagagcccgctcctctgcgacctctcaactggtcttccaggtatgaatgcagatgtgactatcatgctaaatttgactctgtaacgggggaatgtgacgagtgtgaatatttgaatcggggcaaaaatggctgtatctttcataatgctacacattgtcaaatttgtcacgctgttcctccatgggaaaaggaaaatgtgtcagattttaatgattttgatgactgtaataaagagcagtaa

SEQ ID NO: 539 - DNA, 2211 bp, Bovine adeno-associated virus
atgtcttttgttgaccaccctccagattggttggaatcgatcggcgacggctttcgtgaatttctcggccttgaggcgggtcccccgaaacccaaggccaatcaacagaagcaagataacgctcgaggtcttgtgcttcctgggtacaagtatcttggtcctgggaacggccttgataagggcgatcctgtcaattttgctgacgaggttgcccgagagcacgacctctcctaccagaaacagcttgaggcgggcgataacccttacctcaagtacaaccacgcggacgcagagtttcaggagaaactcgcttctgacacttcttttgggggaaaccttgggaaggctgttttccaggctaaaaagaggattctcgaacctcttggcctggttgagacgccggataaaacggcgcctgcggcaaaaaagaggcctctagagcagagtcctcaagagccagactcctcgagcggagttggcaagaaaggcaaacagcctgccagaaagagactcaactttgacgacgaacctggagccggagacgggcctcccccagaaggaccatcttccggagctatgtctactgagactgaaatgcgtgcagcagctggcggaaatggtggcgatgcgggacaaggtgccgagggagtgggtaatgcctccggtgattggcattgcgattccacttggtcagagagccacgtcaccaccacctcaacccgcacctgggtcctgccgacctacaacaaccacctgtacctgcggctcggctcgagcaacgccagcgacaccttcaacggattctccaccccctggggatactttgactttaaccgcttccactgccacttctcgccaagagactggcaaaggctcatcaacaaccactggggactgcgccccaaaagcatgcaagtccgcatcttcaacatccaagttaaggaggtcacgacgtctaacggggagacgaccgtatccaacaacctcaccagcacggtccagatctttgcggacagcacgtacgagctcccgtacgtgatggatgcaggtcaggagggcagcttgcctcctttccccaacgacgtgttcatggtgcctcagtacgggtactgcggactggtaaccggaggcagctctcaaaaccagacagacagaaatgccttctactgtctggagtactttcccagccagatgctgagaaccggaaacaactttgagatggtgtacaagtttgaaaacgtgcccttccactccatgtacgctcacagccagagcctggataggctgatgaacccgctgctggaccagtacctgtgggagctccagtctaccacctctggaggaactctcaaccagggcaattcagccaccaactttgccaagctgaccaaaacaaacttttctggctaccgcaaaaactggctcccggggcccatgatgaagcagcagagattctccaagactgccagtcaaaactacaagattccccagggaagaaacaacagtctgctccattatgagaccagaactaccctcgacggaagatggagcaattttgccccgggaacggccatggcaaccgcagccaacgacgccaccgacttctctcaggcccagctcatctttgcggggcccaacatcaccggcaacaccaccacagatgccaataacctgatgttcacttcagaagatgaacttagggccaccaacccccgggacactgacctgtttggccacctggcaaccaaccagcaaaacgccaccaccgttcctaccgtagacgacgtggacggagtcggcgtgtacccgggaatggtgtggcaggacagagacatttactaccaagggcccatttgggccaaaattccacacacggatggacactttcacccgtctcctctcattggcggatttggactgaaaagcccgcctccacaaatattcatcaaaaacactcctgtacccgccaatcccgcaacgaccttctctccggccagaatcaacagcttcatcacccagtacagcaccggacaggtggctgtcaaaatagaatgggaaatccagaaggagcggtccaagagatggaacccagaggtccagttcacgtccaactacggagcacaggactcgcttctctgggctcccgacaacgccggagcctacaaagagcccagggccattggatcccgatacctcaccaaccacctctag

SEQ ID NO: 540 - DNA, 4694 bp, Bovine adeno-associated virus
gtggcactcccccccctgtcgcgttcgctcgttcgctggctcgattgggggggtggcagctcaaagagctgccagacgacggccctctgggccgtcgcccccccaatcgagccagcgaacgagcgaacgcgacaggggggggagtgccacactctctagcaagggggttttgtaggtggtgatgtcattgttgatgtcattatagttgtcacgcgatagttaatgattaacagtcatgtgatgtgtgttatccaataggatgaaagcgcgcgaatgagatctcgcgagacttccggggtataaaaggggtgagtgaacgagcccgccgccattctctgctctggactgctagaggaccctcgctgccatggctaccttctatgaagtcattgttcgcgttccatttgatgtggaagagcacctgcctggaatttctgacaactttgtagactgggtaactggtcaaatttgggagctgcctcccgagtcagatttgaatttgactctgattgagcagcctcagctgacggtggctgacagaattcgccgcgtgttcctgtacgagtggaacaaattttccaagcaggagagcaaattctttgtgcagtttgaaaagggatctgaatattttcatctgcacacgctcgtggagacctccggcatctcttctatggtccttggccgctacgtgagtcagattcgcgcccagctggtgaaggtggtgttccagaacattgagccgcggattaacgactgggtcgccatcaccaaggtaaagaagggcggagccaataaggtggtggattctgggtatattcccgcctacctgctgccgaaggtccaaccagagcttcagtgggcgtggactaacctcgaagagtataaattggccgccctcaatctggaggagcgcaaacggctcgtcgctcagtttcagcttgagtcctcgcagcgctcgcaagaggcatcttcccagagggacgtttcggctgacccggtcatcaagagcaagacttcccagaaatacatggcgctggtaagctggctggtggaacatggcatcacttccgagaagcagtggattcaggagaatcaggagagctacctgtccttcaactccacgggaaactctcggagccagattaaagccgcgcttgacaacgcgtcaaaaattatgagtctgaccaaatctgcctcagactatctcgtgggacagactgttccagaggacatttctgaaaacagaatctggcagatttttgatctcaacggctacgacccggcatacgcgggctctgttctctacggctggtgcactcgcgcctttggaaagaggaacaccgtctggctgtatggacccgcgaccaccggaaagaccaacatcgcggaagccatctctcacaccgtgcccttttatggctgtgtgaactggactaatgagaactttccctttaatgactgtgtggaaaaaatgttgatctggtgggaggagggaaagatgaccagcaaggtggtggaacccgccaaggccatcttgggggggtctagagtacgagtggatcaaaaatgtaaatcctctgtacaagtagactctaccccggtgattatcacctccaatactaacatgtgtgtggtggtggatgggaactccacgacctttgaacaccagcagccgctggaagaccgcatgttcagatttgaactcatgcggcggctcccgccagattttggcaagattaccaagcaggaagtcaaagacttttttgcttgggcaaaggtcaaccaggtgccggtgactcacgagtttatggttcccaagaaagtggcgggaactgagagggcggagacttctagaaaacgcccactggatgacgtcaccaataccaactataaaagtccggagaagcgggcccggctctcagttgttcctgagacgcctcgcagttcagacgtgcctgtagagcccgctcctctgcgacctctcaactggtcttccaggtatgaatgcagatgtgactatcatgctaaatttgactctgtaacgggggaatgtgacgagtgtgaatatttgaatcggggcaaaaatggctgtatctttcataatgctacacattgtcaaatttgtcacgctgttcctccatgggaaaaggaaaatgtgtcagattttaatgattttgatgactgtaataaagagcagtaaataaagtgagtagtcatgtcttttgttgaccaccctccagattggttggaatcgatcggcgacggctttcgtgaatttctcggccttgaggcgggtcccccgaaacccaaggccaatcaacagaagcaagataacgctcgaggtcttgtgcttcctgggtacaagtatcttggtcctgggaacggccttgataagggcgatcctgtcaattttgctgacgaggttgcccgagagcacgacctctcctaccagaaacagcttgaggcgggcgataacccttacctcaagtacaaccacgcggacgcagagtttcaggagaaactcgcttctgacacttcttttgggggaaaccttgggaaggctgttttccaggctaaaaagaggattctcgaacctcttggcctggttgagacgccggataaaacggcgcctgcggcaaaaaagaggcctctagagcagagtcctcaagagccagactcctcgagcggagttggcaagaaaggcaaacagcctgccagaaagagactcaactttgacgacgaacctggagccggagacgggcctcccccagaaggaccatcttccggagctatgtctactgagactgaaatgcgtgcagcagctggcggaaatggtggcgatgcgggacaaggtgccgagggagtgggtaatgcctccggtgattggcattgcgattccacttggtcagagagccacgtcaccaccacctcaacccgcacctgggtcctgccgacctacaacaaccacctgtacctgcggctcggctcgagcaacgccagcgacaccttcaacggattctccaccccctggggatactttgactttaaccgcttccactgccacttctcgccaagagactggcaaaggctcatcaacaaccactggggactgcgccccaaaagcatgcaagtccgcatcttcaacatccaagttaaggaggtcacgacgtctaacggggagacgaccgtatccaacaacctcaccagcacggtccagatctttgcggacagcacgtacgagctcccgtacgtgatggatgcaggtcaggagggcagcttgcctcctttccccaacgacgtgttcatggtgcctcagtacgggtactgcggactggtaaccggaggcagctctcaaaaccagacagacagaaatgccttctactgtctggagtactttcccagccagatgctgagaaccggaaacaactttgagatggtgtacaagtttgaaaacgtgcccttccactccatgtacgctcacagccagagcctggataggctgatgaacccgctgctggaccagtacctgtgggagctccagtctaccacctctggaggaactctcaaccagggcaattcagccaccaactttgccaagctgaccaaaacaaacttttctggctaccgcaaaaactggctcccggggcccatgatgaagcagcagagattctccaagactgccagtcaaaactacaagattccccagggaagaaacaacagtctgctccattatgagaccagaactaccctcgacggaagatggagcaattttgccccgggaacggccatggcaaccgcagccaacgacgccaccgacttctctcaggcccagctcatctttgcggggcccaacatcaccggcaacaccaccacagatgccaataacctgatgttcacttcagaagatgaacttagggccaccaacccccgggacactgacctgtttggccacctggcaaccaaccagcaaaacgccaccaccgttcctaccgtagacgacgtggacggagtcggcgtgtacccgggaatggtgtggcaggacagagacatttactaccaagggcccatttgggccaaaattccacacacggatggacactttcacccgtctcctctcattggcggatttggactgaaaagcccgcctccacaaatattcatcaaaaacactcctgtacccgccaatcccgcaacgaccttctctccggccagaatcaacagcttcatcacccagtacagcaccggacaggtggctgtcaaaatagaatgggaaatccagaaggagcggtccaagagatggaacccagaggtccagttcacgtccaactacggagcacaggactcgcttctctgggctcccgacaacgccggagcctacaaagagcccagggccattggatcccgatacctcaccaaccacctctagcccaattctgttgcataccctcaataaaccgtgtattcgtttcagtaaaatactgcctcttgtggtcattcggcgtacaacagcttacaacaacaacaaaacccccttgctagagagtgtggcactcccccccctgtcgcgttcgctcgttcgctggctcgattgggggggtggcagctcaaagagctgccagacgacggccctctgggccgtcgcccccccaatcgagccagcgaacgagcgaacgcgacaggggggggagtgccac

SEQ ID NO: 541 - protein, 390 aa, Bovine adeno-associated virus
MALVSWLVEHGITSEKQWIQENQESYLSFNSTGNSRSQIKAALDNASKIMSLTKSASDYLVGQTVPEDISENRIWQIFDLNGYDPAYAGSVLYGWCTRAFGKRNTVWLYGPATTGKTNIAEAISHTVPFYGCVNWTNENFPFNDCVEKMLIWWEEGKMTSKVVEPAKAILGGSRVRVDQKCKSSVQVDSTPVIITSNTNMCVVVDGNSTTFEHQQPLEDRMFRFELMRRLPPDFGKITKQEVKDFFAWAKVNQVPVTHEFMVPKKVAGTERAETSRKRPLDDVTNTNYKSPEKRARLSVVPETPRSSDVPVEPAPLRPLNWSSRYECRCDYHAKFDSVTGECDECEYLNRGKNGCIFHNATHCQICHAVPPWEKENVSDFNDFDDCNKEQ

SEQ ID NO: 542 - protein, 610 aa, Bovine adeno-associated virus
MATFYEVIVRVPFDVEEHLPGISDNFVDWVTGQIWELPPESDLNLTLIEQPQLTVADRIRRVFLYEWNKFSKQESKFFVQFEKGSEYFHLHTLVETSGISSMVLGRYVSQIRAQLVKVVFQNIEPRINDWVAITKVKKGGANKVVDSGYIPAYLLPKVQPELQWAWTNLEEYKLAALNLEERKRLVAQFQLESSQRSQEASSQRDVSADPVIKSKTSQKYMALVSWLVEHGITSEKQWIQENQESYLSFNSTGNSRSQIKAALDNASKIMSLTKSASDYLVGQTVPEDISENRIWQIFDLNGYDPAYAGSVLYGWCTRAFGKRNTVWLYGPATTGKTNIAEAISHTVPFYGCVNWTNENFPFNDCVEKMLIWWEEGKMTSKVVEPAKAILGGSRVRVDQKCKSSVQVDSTPVIITSNTNMCVVVDGNSTTFEHQQPLEDRMFRFELMRRLPPDFGKITKQEVKDFFAWAKVNQVPVTHEFMVPKKVAGTERAETSRKRPLDDVTNTNYKSPEKRARLSVVPETPRSSDVPVEPAPLRPLNWSSRYECRCDYHAKFDSVTGECDECEYLNRGKNGCIFHNATHCQICHAVPPWEKENVSDFNDFDDCNKEQ

SEQ ID NO: 543 - protein, 538 aa, Artificial Sequence
  Description of Artificial Sequence: Synthetic polypeptide
MRAAAGGNGGDAGQGAEGVGNASGDWHCDSTWSESHVTTTSTRTWVLPTYNNHLYLRLGSSNASDTFNGFSTPWGYFDFNRFHCHFSPRDWQRLINNHWGLRPKSMQVRIFNIQVKEVTTSNGETTVSNNLTSTVQIFADSTYELPYVMDAGQEGSLPPFPNDVFMVPQYGYCGLVTGGSSQNQTDRNAFYCLEYFPSQMLRTGNNFEMVYKFENVPFHSMYAHSQSLDRLMNPLLDQYLWELQSTTSGGTLNQGNSATNFAKLTKTNFSGYRKNWLPGPMMKQQRFSKTASQNYKIPQGRNNSLLHYETRTTLDGRWSNFAPGTAMATAANDATDFSQAQLIFAGPNITGNTTTDANNLMFTSEDELRATNPRDTDLFGHLATNQQNATTVPTVDDVDGVGVYPGMVWQDRDIYYQGPIWAKIPHTDGHFHPSPLIGGFGLKSPPPQIFIKNTPVPANPATTFSPARINSFITQYSTGQVAVKIEWEIQKERSKRWNPEVQFTSNYGAQDSLLWAPDNAGAYKEPRAIGSRYLTNHL

SEQ ID NO: 544 - protein, 736 aa, Artificial Sequence
  Description of Artificial Sequence: Synthetic polypeptide
MSFVDHPPDWLESIGDGFREFLGLEAGPPKPKANQQKQDNARGLVLPGYKYLGPGNGLDKGDPVNFADEVAREHDLSYQKQLEAGDNPYLKYNHADAEFQEKLASDTSFGGNLGKAVFQAKKRILEPLGLVETPDKTAPAAKKRPLEQSPQEPDSSSGVGKKGKQPARKRLNFDDEPGAGDGPPPEGPSSGAMSTETEMRAAAGGNGGDAGQGAEGVGNASGDWHCDSTWSESHVTTTSTRTWVLPTYNNHLYLRLGSSNASDTFNGFSTPWGYFDFNRFHCHFSPRDWQRLINNHWGLRPKSMQVRIFNIQVKEVTTSNGETTVSNNLTSTVHIFADSTYELPYVMDAGQEGSLPPFPNDVFMVPQYGYCGLVTGGSSQNQTDRNAFYCLEYFPSQMLRTGNNFEMVYKFENVPFHSMYAHSQSLDRLMNPLLDQYLWELQSTTSGGTLNQGNSATNFAKLTNKNFSGYRKNWLPGPMMKQQRFSKTASQNYKIPQGGNNSLLHYETRTTLDRRWSNFAPGTAMATAANDATDFSQAQLIFAGPNITGNTTTDANNLMFTSEDELRATNPRDTDLFGHLATNQQNATTVPTVDDVDGVGVYPGMVWQDRDIYYQGPIWAKIPHTDGHFHPSPLIGGFGLKSPPPQIFIKNTPVPANPATTFSPARINSFITQYSTGQVAVKIEWEIQKERSKRWNPEVQFTSNYGAQDSLLWAPDNAGAYKEPRAIGSRYLTNHL

SEQ ID NO: 545 - protein, 736 aa, Artificial Sequence
  Description of Artificial Sequence: Synthetic polypeptide
MSFVDHPPDWLESIGDGFREFLGLEAGPPKPKANQQKQDNARGLVLPGYKYLGPGNGLDKGDPVNFADEVAREHDLSYQKQLEAGDNPYLKYNHADAEFQEKLASDTSFGGNLGKAVFQAKKRILEPLGLVETPDKTAPAAKKRPLEQSPQEPDSSSGVGKKGKQPARKRLNFDDEPGAGDGPPPEGPSSGAMSTETEMRAAAGGNGGDAGQGAEGVGNASGDWHCDSTWSESHVTTTSTRTWVLPTYNNHLYLRLGSSNASDTFNGFSTPWGYFDFNRFHCHFSPRDWQRLINNHWGLRPKSMQVRIFNIQVKEVTTSNGETTVSNNLTSTVQIFADSTYELPYVMDAGQEGSLPPFPNDVFMVPQYGYCGLVTGGSSQNQTDRNAFYCLEYFPSQMLRTGNNFEMVYKFENVPFHSMYAHSQSLDRLMNPLLDQYLWELQSTTSGGTLNQGNSATNFAKLTKTNFSGYRKNWLPGPMMKQQRFSKTASQNYKIPQGRNNSLLHYETRTTLDGRWSNFAPGTAMATAANDATDFSQAQLIFAGPNITGNTTTDANNLMFTSEDELRATNPRDTDLFGHLATNQQNATTVPTVDDVDGVGVYPGMVWQDRDIYYQGPIWAKIPHTDGHFHPSPLIGGFGLKSPPPQIFIKNTPVPANPATTFSPARINSFITQYSTGQVAVKIEWEIQKERSKRWNPEVQFTSNYGAQDSLLWAPDNAGAYKEPRAIGSRYLTNHL

SEQ ID NO: 546 - protein, 736 aa, Bovine adeno-associated virus; identical to SEQ ID NO: 545

SEQ ID NO: 547 - protein, 600 aa, Bovine adeno-associated virus
TAPAAKKRPLEQSPQEPDSSSGVGKKGKQPARKRLNFDDEPGAGDGPPPEGPSSGAMSTETEMRAAAGGNGGDAGQGAEGVGNASGDWHCDSTWSESHVTTTSTRTWVLPTYNNHLYLRLGSSNASDTFNGFSTPWGYFDFNRFHCHFSPRDWQRLINNHWGLRPKSMQVRIFNIQVKEVTTSNGETTVSNNLTSTVQIFADSTYELPYVMDAGQEGSLPPFPNDVFMVPQYGYCGLVTGGSSQNQTDRNAFYCLEYFPSQMLRTGNNFEMVYKFENVPFHSMYAHSQSLDRLMNPLLDQYLWELQSTTSGGTLNQGNSATNFAKLTKTNFSGYRKNWLPGPMMKQQRFSKTASQNYKIPQGRNNSLLHYETRTTLDGRWSNFAPGTAMATAANDATDFSQAQLIFAGPNITGNTTTDANNLMFTSEDELRATNPRDTDLFGHLATNQQNATTVPTVDDVDGVGVYPGMVWQDRDIYYQGPIWAKIPHTDGHFHPSPLIGGFGLKSPPPQIFIKNTPVPANPATTFSPARINSFITQYSTGQVAVKIEWEIQKERSKRWNPEVQFTSNYGAQDSLLWAPDNAGAYKEPRAIGSRYLTNHL

SEQ ID NO: 548 - DNA, 2214 bp, Artificial Sequence
  Description of Artificial Sequence: Synthetic polynucleotide
atggctgccgatggttatcttccagattggctcgaggacactctctctgaaggaataagacagtggtggaagctcaaacctggcccaccaccaccaaagcccgcagagcggcataaggacgacagcaggggtcttgtgcttcctgggtacaagtacctcggacccttcaacggactcgacaagggagagccggtcaacgaggcagacgccgcggccctcgagcacgacaaagcctacgaccggcagctcgacagcggagacaacccgtacctcaagtacaaccacgccgacgcggagtttcaggagcgccttaaagaagatacgtcttttgggggcaacctcgggcgagcagtcttccaggccaaaaagaggcttcttgaacctcttggtctggttgaggaagcggctaagacggctcctggaaagaagaggcctgtagagcagtctcctcaggaaccggactcctcctcgggcatcggcaagacaggccagcagcccgctaaaaagagactcaatttcggtcagactggcgacacagagtcagtcccagaccctcaaccaatcggagaacctcccgcagccccctcaggtgtgggatctcttacaatggcttcaggtggtggcgcaccagtggcagacaataacgaaggtgccgatggagtgggtagttcctcgggaaattggcattgcgattcccaatggctgggggacagagtcatcaccaccagcacccgaacctgggccctgcccacctacaacaatcacctctacaagcaaatctccaacgggacatcgggaggagccaccaacgacaacacctacttcggctacagcaccccctgggggtattttgactttaacagattccactgccacttttcaccacgtgactggcagcgactcatcaacaacaactggggattccggcccaagagactcagcttcaagctcttcaacatccaggtcaaggaggtcacgcagaatgaaggcaccaagaccatcgccaataaccttaccagcacggtccaggtcttcacggactcggagtaccagctgccgtacgttctcggctctgcccaccagggctgcctgcctccgttcccggcggacgtgttcatgattccccagtacggctacctaacactcaacaacggtagtcaggccgtgggacgctcctccttctactgcctggaatactttccttcgcagatgctgagaaccggcaacaacttccagtttacttacaccttcgaggacgtgcctttccacagcagctacgcccacagccagagcttggaccggctgatgaatcctctgattgaccagtacctgtactacttgtctcggactcaaacaacaggaggcacggcaaatacgcagactctgggcttcagccaaggtgggcctaatacaatggccaatcaggcaaagaactggctgccaggaccctgttaccgccaacaacgcgtctcaacgacaaccgggcaaaacaacaatagcaactttgcctggactgctgggaccaaataccatctgaatggaagaaattcattggctaatcctggcatcgctatggcaacacacaaagacgacaaggagcgtttttttcccagtaacgggatcctgatttttggcaaacaaaatgctgccagagacaatgcggattacagcgatgtcatgctcaccagcgaggaagaaatcaaaaccactaaccctgtggctacagaggaatacggtatcgtggcagataacttgcagcagcaaaacacggctcctcaaattggaactgtcaacagccagggggccttacccggtatggtttggcagaaccgggacgtgtacctgcagggtcccatctgggccaagattcctcacacggacggcaacttccacccgtctccgctgatgggcggctttggcctgaaacatcctccgcctcagatcctgatcaagaacacgcctgtacctgcggatcctccgaccaccttcaaccagtcaaagctgaactctttcatcacgcaatacagcaccggacaggtcagcgtggaaattgaatgggagctgcagaaggaaaacagcaagcgctggaaccccgagatccagtacacctccaactactacaaatctacaagtgtggactttgctgttaatacagaaggcgtgtactctgaaccccaccccattggcacccgttacctcacccgtcccctgtaa

SEQ ID NO: 549 - protein, 737 aa, Artificial Sequence
  Description of Artificial Sequence: Synthetic polypeptide
MAADGYLPDWLEDTLSEGIRQWWKLKPGPPPPKPAERHKDDSRGLVLPGYKYLGPFNGLDKGEPVNEADAAALEHDKAYDRQLDSGDNPYLKYNHADAEFQERLKEDTSFGGNLGRAVFQAKKRLLEPLGLVEEAAKTAPGKKRPVEQSPQEPDSSSGIGKTGQQPAKKRLNFGQTGDTESVPDPQPIGEPPAAPSGVGSLTMASGGGAPVADNNEGADGVGSSSGNWHCDSQWLGDRVITTSTRTWALPTYNNHLYKQISNGTSGGATNDNTYFGYSTPWGYFDFNRFHCHFSPRDWQRLINNNWGFRPKRLSFKLFNIQVKEVTQNEGTKTIANNLTSTVQVFTDSEYQLPYVLGSAHQGCLPPFPADVFMIPQYGYLTLNNGSQAVGRSSFYCLEYFPSQMLRTGNNFQFTYTFEDVPFHSSYAHSQSLDRLMNPLIDQYLYYLSRTQTTGGTANTQTLGFSQGGPNTMANQAKNWLPGPCYRQQRVSTTTGQNNNSNFAWTAGTKYHLNGRNSLANPGIAMATHKDDKERFFPSNGILIFGKQNAARDNADYSDVMLTSEEEIKTTNPVATEEYGIVADNLQQQNTAPQIGTVNSQGALPGMVWQNRDVYLQGPIWAKIPHTDGNFHPSPLMGGFGLKHPPPQILIKNTPVPADPPTTFNQSKLNSFITQYSTGQVSVEIEWELQKENSKRWNPEIQYTSNYYKSTSVDFAVNTEGVYSEPHPIGTRYLTRPL

SEQ ID NO: 550 - protein, 736 aa, Artificial Sequence
  Description of Artificial Sequence: Synthetic polypeptide
MAADGYLPDWLEDNLSEGIREWWDLKPGAPKPKANQQKQDDGRGLVLPGYKYLGPFNGLDKGEPVNAADAAALEHDKAYDQQLKAGDNPYLRYNHADAEFQERLQEDTSFGGNLGRAVFQAKKRVLEPLGLVEEGAKTAPGKKRPVEQSPQEPDSSSGIGKTGQQPAKKRLNFGQTGDTESVPDPQPIGEPPAAPSGVGSLTMASGGGAPVADNNEGADGVGSSSGNWHCDSQWLGDRVITTSTRTWALPTYNNHLYKQISSASTGASNDNHYFGYSTPWGYFDFNRFHCHFSPRDWQRLINNNWGFRPKRLNFKLFNIQVKEVTDNNGVKTIANNLTSTVQVFTDSDYQLPYVLGSAHQGCLPPFPADVFMIPQYGYLTLNNGSQAVGRSSFYCLEYFPSQMLRTGNNFQFTYTFEDVPFHSSYAHSQSLDRLMNPLIDQYLYYLSRTQTTGGTANTQTLGFSQGGPNTMANQAKNWLPGPCYRQQRVSTTTGQNNNSNFAWTAGTKYHLNGRNSLANPGIAMATHKDDKERFFPSNGILIFGKQNAARDNADYSDVMLTSEEEIKTTNPVATEEYGIVADNLQQQNTAPQIGTVNSQGALPGMVWQNRDVYLQGPIWAKIPHTDGNFHPSPLMGGFGLKHPPPQILIKNTPVPADPPTTFNQSKLNSFITQYSTGQVSVEIEWELQKENSKRWNPEIQYTSNYYKSTSVDFAVNTEGVYSEPHPIGTRYLTRPL

SEQ ID NO: 551 - protein, 736 aa, Artificial Sequence
  Description of Artificial Sequence: Synthetic polypeptide
MAADGYLPDWLEDTLSEGIRQWWKLKPGPPPPKPAERHKDDSRGLVLPGYKYLGPFNGLDKGEPVNEADAAALEHDKAYDRQLDSGDNPYLKYNHADAEFQERLQGDTSFGGNLGRAVFQAKKRVLEPLGLVEEGAKTAPGKKRPVEQSPQEPDSSSGIGETGQQPAKKRLNFGQTGDSESVPDPQPLGEPPATPAAVGPTTMASGGGAPMADNNEGADGVGSSSGNWHCDSQWLGDRVITTSTRTWALPTYNNHLYKQISSASTGASNDNHYFGYSTPWGYFDFNRFHCHFSPRDWQRLINNNWGFRPKRLSFKLFNIQVKEVTDNNGVKTIANNLTSTVQVFTDSEYQLPYVLGSAHQGCLPPFPADVFMIPQYGYLTLNNGSQAVGRSSFYCLEYFPSQMLRTGNNFTFSYTFEDVPFHSSYAHSQSLDRLMNPLIDQYLYYLSRTQTTGGTANTQTLGFSQGGPNTMANQAKNWLPGPCYRQQRVSTTTGQNNNSNFAWTAGTKYHLNGRNSLANPGIAMATHKDDKERFFPSNGILIFGKQNAARDNADYSDVMLTSEEEIKTTNPVATEEYGIVADNLQQQNTAPQIGTVNSQGALPGMVWQNRDVYLQGPIWAKIPHTDGNFHPSPLMGGFGLKHPPPQILIKNTPVPADPPTTFNQSKLNSFITQYSTGQVSVEIEWELQKENSKRWNPEIQYTSNYYKSTSVDFAVNTEGVYSEPHPIGTRYLTRPL

SEQ ID NO: 552 - DNA, 2181 bp, Artificial Sequence
  Description of Artificial Sequence: Synthetic polynucleotide
atgtcttttgttgatcaccctccagattggttggaagaagttggtgaaggtcttcgcgagtttttgggccttgaagcgggcccaccgaaaccaaaacccaatcagcagcatcaagatcaagcccgtggtcttgtgctgcctggttataactatctcggacccggaaacggtctcgatcgaggagagcctgtcaacagggcagacgaggtcgcgcgagagcacgacatctcgtacaacgagcagcttgaggcgggagacaacccctacctcaagtacaaccacgcggacgccgagtttcaggagaagctcgccgacgacacatccttcgggggaaacctcggaaaggcagtctttcaggccaagaaaagggttctcgaaccttttggcctggttgaagagggtgctaagacggcccctaccggaaagcggatagacgaccactttccaaaaagaaagaaggctcggaccgaagaggactccaagccttccacctcgtcagacgccgaagctggacccagcggatcccagcagctgcaaatcccagcacaaccagcctcaagtttgggagctgatacaatgtctgcgggaggtggcggcccattgggcgacaataaccaaggtgccgatggagtgggcaatgcctcgggagattggcattgcgattccacgtggatgggggacagagtcgtcaccaagtccacccgcacctgggtgctgcccagctacaacaaccaccagtaccgagagatcaaaagcggctccgtcgacggaagcaacgccaacgcctactttggatacagcaccccctgggggtactttgactttaaccgcttccacagccactggagcccccgagactggcaaagactcatcaacaactattggggcttcagaccccggtctctcagagtcaaaatcttcaacatccaagtcaaagaggtcacggtgcaggactccaccaccaccatcgccaacaacctcacctccaccgtccaagtgtttacggacgacgactaccaactcccgtacgtcgtcggcaacgggaccgagggatgcctgccggccttccccccgcaggtctttacgctgccgcagtacggctacgcgacgctgaaccgagacaacggagacaacccgacagagcggagcagcttcttttgcctagagtactttcccagcaagatgctgaggacgggcaacaactttgagtttacctacagctttgaagaggtgcccttccactgcagcttcgccccgagccagaacctctttaagctggccaacccgctggtggaccagtacctgtaccgcttcgtgagcacctcggccacgggcgccatccagttccaaaagaacctggcgggcagatacgccaacacctacaaaaactggttcccggggcccatgggccgaacccagggctggaacacgagctctggggtcagcagcaccaacagagtcagcgtcaacaacttttccgtctcaaaccggatgaacctggagggggccagctaccaagtgaacccccagcccaacgggatgacaaacacgctccaaggcagcaaccgctacgcgctggaaaacaccatgatcttcaacgctcaaaacgccacgccgggaactacctcggtgtacccagaggacaatctactgctgaccagcgagagcgagactcagcccgtcaaccgggtggcttacaacacgggcggtcagatggccaccaacgcccagaacgccaccacggctcccacggtcgggacctacaacctccaggaagtgcttcctggcagcgtatggatggagagggacgtgtacctccaaggacccatctgggccaagatcccagagacgggggcgcactttcacccctctccggccatgggcggattcggactcaaacacccgccgcccatgatgctcatcaaaaacacgccggtgcccggcaacatcaccagcttctcggacgtgcccgtcagcagcttcatcacccagtacagcaccgggcaggtcaccgtggagatggaatgggagctcaaaaaggaaaactccaagaggtggaacccagagatccagtacaccaacaactacaacgacccccagtttgtggactttgctccagacggctccggcgaatacagaaccaccagagccatcggaacccgatacctcacccgacccctt

SEQ ID NO: 553 - protein, 726 aa, Artificial Sequence
  Description of Artificial Sequence: Synthetic polypeptide
MSFVDHPPDWLEEVGEGLREFLGLEAGPPKPKPNQQHQDQARGLVLPGYNYLGPGNGLDRGEPVNRADEVAREHDISYNEQLEAGDNPYLKYNHADAEFQEKLADDTSFGGNLGKAVFQAKKRVLEPFGLVEEGAKTAPTGKRIDDHFPKRKKARTEEDSKPSTSSDAEAGPSGSQQLQIPAQPASSLGADTMSAGGGGPLGDNNQGADGVGNASGDWHCDSTWMGDRVVTKSTRTWVLPSYNNHQYREIKSGSVDGSNANAYFGYSTPWGYFDFNRFHSHWSPRDWQRLINNYWGFRPRSLRVKIFNIQVKEVTVQDSTTTIANNLTSTVQVFTDDDYQLPYVVGNGTEGCLPAFPPQVFTLPQYGYATLNRDNGDNPTERSSFFCLEYFPSKMLRTGNNFEFTYSFEEVPFHCSFAPSQNLFKLANPLVDQYLYRFVSTSATGAIQFQKNLAGRYANTYKNWFPGPMGRTQGWNTSSGSSTNRVSVNNFSVSNRMNLEGASYQVNPQPNGMTNTLQGSNRYALENTMIFNAQNATPGTTSVYPEDNLLLTSESETQPVNRVAYNTGGQMATNAQNATTAPTVGTYNLQEVLPGSVWMERDVYLQGPIWAKIPETGAHFHPSPAMGGFGLKHPPPMMLIKNTPVPGNITSFSDVPVSSFITQYSTGQVTVEMEWELKKENSKRWNPEIQYTNNYNDPQFVDFAPDGSGEYRTTRAIGTRYLTRPL

SEQ ID NO: 554 - protein, 735 aa, Artificial Sequence
  Description of Artificial Sequence: Synthetic polypeptide
MAADGYLPDWLEDTLSEGIRQWWKLKPGPPPPKPAERHKDDSRGLVLPGYKYLGPFNGLDKGEPVNEADAAALEHDKAYDRQLDSGDNPYLKYNHADAEFQERLKEDTSFGGNLGRAVFQAKKRILEPLGLVEEPVKTAPGKKRPVEHSPAEPDSSSGTGKSGQQPARKRLNFGQTGDADSVPDPQPLGQPPAAPSGLGTNTMASGSGAPMADNNEGADGVGNSSGNWHCDSTWMGDRVITTSTRTWALPTYNNHLYKQISSQSGASNDNHYFGYSTPWGYFDFNRFHCHFSPRDWQRLINNNWGFRPKRLSFKLFNIQVKEVTQNDGTTTIANNLTSTVQVFTDSEYQLPYVLGSAHQGCLPPFPADVFMVPQYGYLTLNNGSQAVGRSSFYCLEYFPSQMLRTGNNFTFSYTFEDVPFHSSYAHSQSLDRLMNPLIDQYLYYLSRTNTPSGTTTMSRLQFSQAGASDIRDQSRNWLPGPCYRQQRVSKTAADNNNSDYSWTGATKYHLNGRDSLVNPGPAMASHKDDEEKYFPQSGVLIFGKQDSGKTNVDIEKVMITDEEEIRTTNPVATEQYGSVSTNLQSGNTQAATSDVNTQGVLPGMVWQDRDVYLQGPIWAKIPHTDGHFHPSPLMGGFGLKHPPPQILIKNTPVPANPSTTFSAAKFASFITQYSTGQVSVEIEWELQKENSKRWNPEIQYTSNYNKSVNVDFTVDTNGVYSEPRPIGTRYLTRNL

SEQ ID NO: 555 - DNA, 1797 bp, Artificial Sequence
  Description of Artificial Sequence: Synthetic polynucleotide
acggctccgaccggagacaagcggaaaggcgaagacgaacctcgtttgcccgacacttcttcacagactcccaagaaaaacaagaagcctcgcaaggaaagaccttccggcggggcagaagatccgggcgaaggcacctcttccaacgctggagcagcagcacccgcctctagtgtgggatcatctatcatggctgaaggaggtggcggcccagtgggcgatgcaggccagggtgccgatggagtgggcaattcctccggaaattggcattgcgattcccaatggctggaaaacggagtcgtcactcgaaccacccgaacctgggtcttgcccagctacaacaaccacctgtacaaacgaatccaaggacccagcggaggcgacaacaacaacaaattctttggattcagcaccccctggggatactttgactacaatcgattccactgccacttttccccgcgagactggcaacgactcatcaacaacaactggggcatccgtcccaaagcgatgcgctttagactctttaacatccaggttaaagaggtcacggtccaagacttcaacaccaccatcggcaacaacctcaccagtacggtccaggtctttgcggacaaggactaccaactgccgtacgtcctcggatcggctaccgaaggcaccttcccgccgttcccagcggatatctacacgatcccgcagtacgggtactgcacgctaaactacaacaacgaggcggtggatcgttcggccttctactgtctggactactttccctcagacatgctgcggacaggaaataactttgagtttacttacaccttcgaggacgttcctttccatagcatgtttgcccacaaccagacgctagaccggctgatgaatcccctcgtggatcagtacctctgggctttcagctccgtcagccaagcaggctcatctggacgagctcttcattactcgcgggcgactaaaaccaacatggcggctcaatataggaactggttacctgggcctttcttccgtgatcagcaaatctttacgggcgctagcaacatcactaaaaataacgtctttagcgtttgggaaaaaggcaagcaatgggaactcgacaatcggaccaacctaatgcagcccggtcctgcggcagcgaccacctttagcggagaacctgaccgtcaagccatgcaaaacacgctggcttttagcaggaccgtctacgatcaaacgaccgccacgaccgatcgtaaccagatactcatcaccaacgaagacgaaatcagacccaccaactcggtcggtatcgacgcgtggggagcagttcccaccaacaaccagtcgatcgtgacccccggcactcgcgcggccgtcaacaatcaaggggcgcttcccgggatggtgtggcaaaacagagacatttaccctacagggacccatttggccaaaattcccgacactgacaatcacttccatccgtccccgcttattgggcggtttggctgcaagcatccccctccccagattttcattaaaaacacacccgtccctgccaacccttcggaaacgttccagacggccaaagtggcctccttcatcaaccagtactcgaccggacagtgcaccgtcgaaatcttttgggaactcaagaaggaaacctccaagcgctggaaccccgaaatccagttcacctccaactttggcaacgcggccgacatccagtttgccgtctccgacacgggatcctattccgaacctcgtcccatcggtacccgttaccttaccaaacctctgtaa

SEQ ID NO: 556 - DNA, 1989 bp, Artificial Sequence
  Description of Artificial Sequence: Synthetic polynucleotide
atgaggtcgtactacgaggtcatcgttcagctgcccaacgacgtcgagagtcaggtacctggaatctccgattcgttcgtcaactggattacgtcgcgagaatggacgttgcctgaggacgccgattgggatttggaccaggtcgatcaagttcaactgacgctcggcgacaaaatccaacgggagattcgaactcattgggggacgatggccaaagaaccggactttcactattttatccaactggaacaaggtgaggtgttctttcatttacacgtcctgctggaaacgtgttccgtaaagccgatggtactcggaagatatatccgacatattcaacaaaaaattgtgagtaaagtctactgcgccacgagcctacgatggaaggatggatgcgtggtgaccaagaccaaaaatttcgggggcgcgaacaaggtccgggccgagtcgtatattcccgcctacctgatcccgaaacagcaaccggaagtgcagtgggcgtggactaacgtgcccgagtatataaaagcgtgcttgcaccgagaactgcgtgccagtctcgcgcgacttcacttcgaggaggcgggcgtctcgcaatccaaggaaaatctcgcgagaactgcagacggcgctcccgtgatgccgacccgcgtcagcaaacgctacatggagctcgtggattggctcgtggagaaggggatcaccaccgagaaggaatggctgctggaaaacagagaaagctttcggagctttcaggcctcgagcaactcggcgcgtcagatcaagacggccctgcaaggcgccattcaggagatgcttctgaccaagacggcggaggactacctcgtcggaaaggatcccgtctcggacgacgacatccgtcagaaccgcatctacaagattctggaactgaaccactacgacccagcgtacgtggggagtattttggtcgggtggtgccagaagaaatggggcaagcgaaacacgctgtggctgttcggacatgcgaccaccggcaagaccaacatcgcggaggctattgcccatgctgtgccgttctatggatgcgttaactggaccaacgagaactttccgttcaacgactgcgtcgaaaaaatgattatctggtgggaggagggcaaaatgaccgccaaagtggtggaaacagccaaggcgattctgggaggatctcgggtgagagtggaccaaaaatgcaaagcttcggttccgatcgaaccgacgccggtcattattaccagtaacaccaacatgtgttatgtcatcgacgggaacacgaccacgttcgagcataagcagccgttggaggacaggatgtttaagctcgaattgctgactcggttgcctgatgactttggtaaggtgaccaaacaggaggtgcgtcaattcttcaggtggtctcaggatcacctgacccctgtgatcccagaattcctagtgcggaaggcggagtctcgcaaaagacccgccccttccggggaaggctatataagcccgacaaagcggcccgcgctcgcagagcagcagcaggcgtcggagagcgcggacccggttcccaccaggtatcgtatcaaatgctcgaaacattgcggtatggataaaatgttgtttccttgccaaatttgtgaatcgatgaacagagatattaatatttgtgctattcataaaacgaccgactgtaaagagtgtttccccgactacggggataaagatgatgtagaactacccccctgtacagaacacaacgtgtctcgttgttatcaatgtcattcgggcgaattgtatcgcgtgacttcggactctgacgagaaacctgcccccgagagtgatgaaggcaccgagccatcctatgctccctgcacgattcaccacctgatgggcaagagtcacgggttagtcacttgcgcggcgtgtcggttgaaaaatagtacgttgcatgatgacttggatgacggtgatctcgaacaataa

SEQ ID NO: 557 - DNA, 1626 bp, Artificial Sequence
  Description of Artificial Sequence: Synthetic polynucleotide
atgaggtcgtactacgaggtcatcgttcagctgcccaacgacgtcgagagtcaggtacctggaatctccgattcgttcgtcaactggattacgtcgcgagaatggacgttgcctgaggacgccgattgggatttggaccaggtcgatcaagttcaactgacgctcggcgacaaaatccaacgggagattcgaactcattgggggacgatggccaaagaaccggactttcactattttatccaactggaacaaggtgaggtgttctttcatttacacgtcctgctggaaacgtgttccgtaaagccgatggtactcggaagatatatccgacatattcaacaaaaaattgtgagtaaagtctactgcgccacgagcctacgatggaaggatggatgcgtggtgaccaagaccaaaaatttcgggggcgcgaacaaggtccgggccgagtcgtatattcccgcctacctgatcccgaaacagcaaccggaagtgcagtgggcgtggactaacgtgcccgagtatataaaagcgtgcttgcaccgagaactgcgtgccagtctcgcgcgacttcacttcgaggaggcgggcgtctcgcaatccaaggaaaatctcgcgagaactgcagacggcgctcccgtgatgccgacccgcgtcagcaaacgctacatggagctcgtggattggctcgtggagaaggggatcaccaccgagaaggaatggctgctggaaaacagagaaagctttcggagctttcaggcctcgagcaactcggcgcgtcagatcaagacggccctgcaaggcgccattcaggagatgcttctgaccaagacggcggaggactacctcgtcggaaaggatcccgtctcggacgacgacatccgtcagaaccgcatctacaagattctggaactgaaccactacgacccagcgtacgtggggagtattttggtcgggtggtgccagaagaaatggggcaagcgaaacacgctgtggctgttcggacatgcgaccaccggcaagaccaacatcgcggaggctattgcccatgctgtgccgttctatggatgcgttaactggaccaacgagaactttccgttcaacgactgcgtcgaaaaaatgattatctggtgggaggagggcaaaatgaccgccaaagtggtggaaacagccaaggcgattctgggaggatctcgggtgagagtggaccaaaaatgcaaagcttcggttccgatcgaaccgacgccggtcattattaccagtaacaccaacatgtgttatgtcatcgacgggaacacgaccacgttcgagcataagcagccgttggaggacaggatgtttaagctcgaattgctgactcggttgcctgatgactttggtaaggtgaccaaacaggaggtgcgtcaattcttcaggtggtctcaggatcacctgacccctgtgatcccagaattcctagtgcggaaggcggagtctcgcaaaagacccgccccttccggggaaggctatataagcccgacaaagcggcccgcgctcgcagagcagcagcaggcgtcggagagcgcggacccggttcccaccagattggttggagcggttggtcaaaaagggagtgaatgctgcagctga

SEQ ID NO: 558 - DNA, 1323 bp, Artificial Sequence
  Description of Artificial Sequence: Synthetic polynucleotide
atggagctcgtggattggctcgtggagaaggggatcaccaccgagaaggaatggctgctggaaaacagagaaagctttcggagctttcaggcctcgagcaactcggcgcgtcagatcaagacggccctgcaaggcgccattcaggagatgcttctgaccaagacggcggaggactacctcgtcggaaaggatcccgtctcggacgacgacatccgtcagaaccgcatctacaagattctggaactgaaccactacgacccagcgtacgtggggagtattttggtcgggtggtgccagaagaaatggggcaagcgaaacacgctgtggctgttcggacatgcgaccaccggcaagaccaacatcgcggaggctattgcccatgctgtgccgttctatggatgcgttaactggaccaacgagaactttccgttcaacgactgcgtcgaaaaaatgattatctggtgggaggagggcaaaatgaccgccaaagtggtggaaacagccaaggcgattctgggaggatctcgggtgagagtggaccaaaaatgcaaagcttcggttccgatcgaaccgacgccggtcattattaccagtaacaccaacatgtgttatgtcatcgacgggaacacgaccacgttcgagcataagcagccgttggaggacaggatgtttaagctcgaattgctgactcggttgcctgatgactttggtaaggtgaccaaacaggaggtgcgtcaattcttcaggtggtctcaggatcacctgacccctgtgatcccagaattcctagtgcggaaggcggagtctcgcaaaagacccgccccttccggggaaggctatataagcccgacaaagcggcccgcgctcgcagagcagcagcaggcgtcggagagcgcggacccggttcccaccaggtatcgtatcaaatgctcgaaacattgcggtatggataaaatgttgtttccttgccaaatttgtgaatcgatgaacagagatattaatatttgtgctattcataaaacgaccgactgtaaagagtgtttccccgactacggggataaagatgatgtagaactacccccctgtacagaacacaacgtgtctcgttgttatcaatgtcattcgggcgaattgtatcgcgtgacttcggactctgacgagaaacctgcccccgagagtgatgaaggcaccgagccatcctatgctccctgcacgattcaccacctgatgggcaagagtcacgggttagtcacttgcgcggcgtgtcggttgaaaaatagtacgttgcatgatgacttggatgacggtgatctcgaacaataa

SEQ ID NO: 559 - DNA, 960 bp, Artificial Sequence
  Description of Artificial Sequence: Synthetic polynucleotide
atggagctcgtggattggctcgtggagaaggggatcaccaccgagaaggaatggctgctggaaaacagagaaagctttcggagctttcaggcctcgagcaactcggcgcgtcagatcaagacggccctgcaaggcgccattcaggagatgcttctgaccaagacggcggaggactacctcgtcggaaaggatcccgtctcggacgacgacatccgtcagaaccgcatctacaagattctggaactgaaccactacgacccagcgtacgtggggagtattttggtcgggtggtgccagaagaaatggggcaagcgaaacacgctgtggctgttcggacatgcgaccaccggcaagaccaacatcgcggaggctattgcccatgctgtgccgttctatggatgcgttaactggaccaacgagaactttccgttcaacgactgcgtcgaaaaaatgattatctggtgggaggagggcaaaatgaccgccaaagtggtggaaacagccaaggcgattctgggaggatctcgggtgagagtggaccaaaaatgcaaagcttcggttccgatcgaaccgacgccggtcattattaccagtaacaccaacatgtgttatgtcatcgacgggaacacgaccacgttcgagcataagcagccgttggaggacaggatgtttaagctcgaattgctgactcggttgcctgatgactttggtaaggtgaccaaacaggaggtgcgtcaattcttcaggtggtctcaggatcacctgacccctgtgatcccagaattcctagtgcggaaggcggagtctcgcaaaagacccgccccttccggggaaggctatataagcccgacaaagcggcccgcgctcgcagagcagcagcaggcgtcggagagcgcggacccggttcccaccagattggttggagcggttggtcaaaaagggagtgaatgctgcagctga

SEQ ID NO: 560 - DNA, 1608 bp, Artificial Sequence
  Description of Artificial Sequence: Synthetic polynucleotide
atggctgaaggaggtggcggcccagtgggcgatgcaggccagggtgccgatggagtgggcaattcctccggaaattggcattgcgattcccaatggctggaaaacggagtcgtcactcgaaccacccgaacctgggtcttgcccagctacaacaaccacctgtacaaacgaatccaaggacccagcggaggcgacaacaacaacaaattctttggattcagcaccccctggggatactttgactacaatcgattccactgccacttttccccgcgagactggcaacgactcatcaacaacaactggggcatccgtcccaaagcgatgcgctttagactctttaacatccaggttaaagaggtcacggtccaagacttcaacaccaccatcggcaacaacctcaccagtacggtccaggtctttgcggacaaggactaccaactgccgtacgtcctcggatcggctaccgaaggcaccttcccgccgttcccagcggatatctacacgatcccgcagtacgggtactgcacgctaaactacaacaacgaggcggtggatcgttcggccttctactgtctggactactttccctcagacatgctgcggacaggaaataactttgagtttacttacaccttcgaggacgttcctttccatagcatgtttgcccacaaccagacgctagaccggctgatgaatcccctcgtggatcagtacctctgggctttcagctccgtcagccaagcaggctcatctggacgagctcttcattactcgcgggcgactaaaaccaacatggcggctcaatataggaactggttacctgggcctttcttccgtgatcagcaaatctttacgggcgctagcaacatcactaaaaataacgtctttagcgtttgggaaaaaggcaagcaatgggaactcgacaatcggaccaacctaatgcagcccggtcctgcggcagcgaccacctttagcggagaacctgaccgtcaagccatgcaaaacacgctggcttttagcaggaccgtctacgatcaaacgaccgccacgaccgatcgtaaccagatactcatcaccaacgaagacgaaatcagacccaccaactcggtcggtatcgacgcgtggggagcagttcccaccaacaaccagtcgatcgtgacccccggcactcgcgcggccgtcaacaatcaaggggcgcttcccgggatggtgtggcaaaacagagacatttaccctacagggacccatttggccaaaattcccgacactgacaatcacttccatccgtccccgcttattgggcggtttggctgcaagcatccccctccccagattttcattaaaaacacacccgtccctgccaacccttcggaaacgttccagacggccaaagtggcctccttcatcaaccagtactcgaccggacagtgcaccgtcgaaatcttttgggaactcaagaaggaaacctccaagcgctggaaccccgaaatccagttcacctccaactttggcaacgcggccgacatccagtttgccgtctccgacacgggatcctattccgaacctcgtcccatcggtacccgttaccttaccaaacctctgtaa

SEQ ID NO: 561 - DNA, 2232 bp, Artificial Sequence
  Description of Artificial Sequence: Synthetic polynucleotide
atgtctctcatttctgatgcgattccagattggttggagcggttggtcaaaaagggagtgaatgctgcagctgatttctaccatttggaaagcggtcctcctcgtcctaaggcaaatcagcaaactcaagaatctcttgaaaaggacgattcgagaggtctcgtgttcccaggctacaattatctaggccctttcaacggtctagataaaggagaacccgtcaacgaggcagacgctgccgccttagaacacgacaaggcttacgacctcgaaatcaaggacgggcacaacccgtactttgagtacaacgaggccgacagacgtttccaggaacgtctcaaagacgatacctcctttggaggcaatttaggtaaagccatcttccaggccaaaaagagggttctcgaaccctttggtctggtggaagactcaaagacggctccgaccggagacaagcggaaaggcgaagacgaacctcgtttgcccgacacttcttcacagactcccaagaaaaacaagaagcctcgcaaggaaagaccttccggcggggcagaagatccgggcgaaggcacctcttccaacgctggagcagcagcacccgcctctagtgtgggatcatctatcatggctgaaggaggtggcggcccagtgggcgatgcaggccagggtgccgatggagtgggcaattcctccggaaattggcattgcgattcccaatggctggaaaacggagtcgtcactcgaaccacccgaacctgggtcttgcccagctacaacaaccacctgtacaaacgaatccaaggacccagcggaggcgacaacaacaacaaattctttggattcagcaccccctggggatactttgactacaatcgattccactgccacttttccccgcgagactggcaacgactcatcaacaacaactggggcatccgtcccaaagcgatgcgctttagactctttaacatccaggttaaagaggtcacggtccaagacttcaacaccaccatcggcaacaacctcaccagtacggtccaggtctttgcggacaaggactaccaactgccgtacgtcctcggatcggctaccgaaggcaccttcccgccgttcccagcggatatctacacgatcccgcagtacgggtactgcacgctaaactacaacaacgaggcggtggatcgttcggccttctactgtctggactactttccctcagacatgctgcggacaggaaataactttgagtttacttacaccttcgaggacgttcctttccatagcatgtttgcccacaaccagacgctagaccggctgatgaatcccctcgtggatcagtacctctgggctttcagctccgtcagccaagcaggctcatctggacgagctcttcattactcgcgggcgactaaaaccaacatggcggctcaatataggaactggttacctgggcctttcttccgtgatcagcaaatctttacgggcgctagcaacatcactaaaaataacgtctttagcgtttgggaaaaaggcaagcaatgggaactcgacaatcggaccaacctaatgcagcccggtcctgcggcagcgaccacctttagcggagaacctgaccgtcaagccatgcaaaacacgctggcttttagcaggaccgtctacgatcaaacgaccgccacgaccgatcgtaaccagatactcatcaccaacgaagacgaaatcagacccaccaactcggtcggtatcgacgcgtggggagcagttcccaccaacaaccagtcgatcgtgacccccggcactcgcgcggccgtcaacaatcaaggggcgcttcccgggatggtgtggcaaaacagagacatttaccctacagggacccatttggccaaaattcccgacactgacaatcacttccatccgtccccgcttattgggcggtttggctgcaagcatccccctccccagattttcattaaaaacacacccgtccctgccaacccttcggaaacgttccagacggccaaagtggcctccttcatcaaccagtactcgaccggacagtgcaccgtcgaaatcttttgggaactcaagaaggaaacctccaagcgctggaaccccgaaatccagttcacctccaactttggcaacgcggccgacatccagtttgccgtctccgacacgggatcctattccgaacctcgtcccatcggtacccgttaccttaccaaacctctgtaa

SEQ ID NO: 562 - protein, 535 aa, Artificial Sequence
  Description of Artificial Sequence: Synthetic polypeptide
MAEGGGGPVGDAGQGADGVGNSSGNWHCDSQWLENGVVTRTTRTWVLPSYNNHLYKRIQGPSGGDNNNKFFGFSTPWGYFDYNRFHCHFSPRDWQRLINNNWGIRPKAMRFRLFNIQVKEVTVQDFNTTIGNNLTSTVQVFADKDYQLPYVLGSATEGTFPPFPADIYTIPQYGYCTLNYNNEAVDRSAFYCLDYFPSDMLRTGNNFEFTYTFEDVPFHSMFAHNQTLDRLMNPLVDQYLWAFSSVSQAGSSGRALHYSRATKTNMAAQYRNWLPGPFFRDQQIFTGASNITKNNVFSVWEKGKQWELDNRTNLMQPGPAAATTFSGEPDRQAMQNTLAFSRTVYDQTTATTDRNQILITNEDEIRPTNSVGIDAWGAVPTNNQSIVTPGTRAAVNNQGALPGMVWQNRDIYPTGTHLAKIPDTDNHFHPSPLIGRFGCKHPPPQIFIKNTPVPANPSETFQTAKVASFINQYSTGQCTVEIFWELKKETSKRWNPEIQFTSNFGNAADIQFAVSDTGSYSEPRPIGTRYLTKPL

SEQ ID NO: 563 - protein, 440 aa, Artificial Sequence
  Description of Artificial Sequence: Synthetic polypeptide
MELVDWLVEKGITTEKEWLLENRESFRSFQASSNSARQIKTALQGAIQEMLLTKTAEDYLVGKDPVSDDDIRQNRIYKILELNHYDPAYVGSILVGWCQKKWGKRNTLWLFGHATTGKTNIAEAIAHAVPFYGCVNWTNENFPFNDCVEKMIIWWEEGKMTAKVVETAKAILGGSRVRVDQKCKASVPIEPTPVIITSNTNMCYVIDGNTTTFEHKQPLEDRMFKLELLTRLPDDFGKVTKQEVRQFFRWSQDHLTPVIPEFLVRKAESRKRPAPSGEGYISPTKRPALAEQQQASESADPVPTRYRIKCSKHCGMDKMLFPCQICESMNRDINICAIHKTTDCKECFPDYGDKDDVELPPCTEHNVSRCYQCHSGELYRVTSDSDEKPAPESDEGTEPSYAPCTIHHLMGKSHGLVTCAACRLKNSTLHDDLDDGDLEQ

SEQ ID NO: 564 - protein, 319 aa, Artificial Sequence
  Description of Artificial Sequence: Synthetic polypeptide
MELVDWLVEKGITTEKEWLLENRESFRSFQASSNSARQIKTALQGAIQEMLLTKTAEDYLVGKDPVSDDDIRQNRIYKILELNHYDPAYVGSILVGWCQKKWGKRNTLWLFGHATTGKTNIAEAIAHAVPFYGCVNWTNENFPFNDCVEKMIIWWEEGKMTAKVVETAKAILGGSRVRVDQKCKASVPIEPTPVIITSNTNMCYVIDGNTTTFEHKQPLEDRMFKLELLTRLPDDFGKVTKQEVRQFFRWSQDHLTPVIPEFLVRKAESRKRPAPSGEGYISPTKRPALAEQQQASESADPVPTRLVGAVGQKGSECCS

SEQ ID NO: 565 - protein, 662 aa, Artificial Sequence
  Description of Artificial Sequence: Synthetic polypeptide
MRSYYEVIVQLPNDVESQVPGISDSFVNWITSREWTLPEDADWDLDQVDQVQLTLGDKIQREIRTHWGTMAKEPDFHYFIQLEQGEVFFHLHVLLETCSVKPMVLGRYIRHIQQKIVSKVYCATSLRWKDGCVVTKTKNFGGANKVRAESYIPAYLIPKQQPEVQWAWTNVPEYIKACLHRELRASLARLHFEEAGVSQSKENLARTADGAPVMPTRVSKRYMELVDWLVEKGITTEKEWLLENRESFRSFQASSNSARQIKTALQGAIQEMLLTKTAEDYLVGKDPVSDDDIRQNRIYKILELNHYDPAYVGSILVGWCQKKWGKRNTLWLFGHATTGKTNIAEAIAHAVPFYGCVNWTNENFPFNDCVEKMIIWWEEGKMTAKVVETAKAILGGSRVRVDQKCKASVPIEPTPVIITSNTNMCYVIDGNTTTFEHKQPLEDRMFKLELLTRLPDDFGKVTKQEVRQFFRWSQDHLTPVIPEFLVRKAESRKRPAPSGEGYISPTKRPALAEQQQASESADPVPTRYRIKCSKHCGMDKMLFPCQICESMNRDINICAIHKTTDCKECFPDYGDKDDVELPPCTEHNVSRCYQCHSGELYRVTSDSDEKPAPESDEGTEPSYAPCTIHHLMGKSHGLVTCAACRLKNSTLHDDLDDGDLEQ

SEQ ID NO: 566 - protein, 541 aa, Artificial Sequence
  Description of Artificial Sequence: Synthetic polypeptide
MRSYYEVIVQLPNDVESQVPGISDSFVNWITSREWTLPEDADWDLDQVDQVQLTLGDKIQREIRTHWGTMAKEPDFHYFIQLEQGEVFFHLHVLLETCSVKPMVLGRYIRHIQQKIVSKVYCATSLRWKDGCVVTKTKNFGGANKVRAESYIPAYLIPKQQPEVQWAWTNVPEYIKACLHRELRASLARLHFEEAGVSQSKENLARTADGAPVMPTRVSKRYMELVDWLVEKGITTEKEWLLENRESFRSFQASSNSARQIKTALQGAIQEMLLTKTAEDYLVGKDPVSDDDIRQNRIYKILELNHYDPAYVGSILVGWCQKKWGKRNTLWLFGHATTGKTNIAEAIAHAVPFYGCVNWTNENFPFNDCVEKMIIWWEEGKMTAKVVETAKAILGGSRVRVDQKCKASVPIEPTPVIITSNTNMCYVIDGNTTTFEHKQPLEDRMFKLELLTRLPDDFGKVTKQEVRQFFRWSQDHLTPVIPEFLVRKAESRKRPAPSGEGYISPTKRPALAEQQQASESADPVPTRLVGAVGQKGSECCS

SEQ ID NO: 567 - protein, 743 aa, Artificial Sequence
  Description of Artificial Sequence: Synthetic polypeptide
MSLISDAIPDWLERLVKKGVNAAADFYHLESGPPRPKANQQTQESLEKDDSRGLVFPGYNYLGPFNGLDKGEPVNEADAAALEHDKAYDLEIKDGHNPYFEYNEADRRFQERLKDDTSFGGNLGKAIFQAKKRVLEPFGLVEDSKTAPTGDKRKGEDEPRLPDTSSQTPKKNKKPRKERPSGGAEDPGEGTSSNAGAAAPASSVGSSIMAEGGGGPVGDAGQGADGVGNSSGNWHCDSQWLENGVVTRTTRTWVLPSYNNHLYKRIQGPSGGDNNNKFFGFSTPWGYFDYNRFHCHFSPRDWQRLINNNWGIRPKAMRFRLFNIQVKEVTVQDFNTTIGNNLTSTVQVFADKDYQLPYVLGSATEGTFPPFPADIYTIPQYGYCTLNYNNEAVDRSAFYCLDYFPSDMLRTGNNFEFTYTFEDVPFHSMFAHNQTLDRLMNPLVDQYLWAFSSVSQAGSSGRALHYSRATKTNMAAQYRNWLPGPFFRDQQIFTGASNITKNNVFSVWEKGKQWELDNRTNLMQPGPAAATTFSGEPDRQAMQNTLAFSRTVYDQTTATTDRNQILITNEDEIRPTNSVGIDAWGAVPTNNQSIVTPGTRAAVNNQGALPGMVWQNRDIYPTGTHLAKIPDTDNHFHPSPLIGRFGCKHPPPQIFIKNTPVPANPSETFQTAKVASFINQYSTGQCTVEIFWELKKETSKRWNPEIQFTSNFGNAADIQFAVSDTGSYSEPRPIGTRYLTKPL

SEQ ID NO: 568 - protein, 598 aa, Artificial Sequence
  Description of Artificial Sequence: Synthetic polypeptide
TAPTGDKRKGEDEPRLPDTSSQTPKKNKKPRKERPSGGAEDPGEGTSSNAGAAAPASSVGSSIMAEGGGGPVGDAGQGADGVGNSSGNWHCDSQWLENGVVTRTTRTWVLPSYNNHLYKRIQGPSGGDNNNKFFGFSTPWGYFDYNRFHCHFSPRDWQRLINNNWGIRPKAMRFRLFNIQVKEVTVQDFNTTIGNNLTSTVQVFADKDYQLPYVLGSATEGTFPPFPADIYTIPQYGYCTLNYNNEAVDRSAFYCLDYFPSDMLRTGNNFEFTYTFEDVPFHSMFAHNQTLDRLMNPLVDQYLWAFSSVSQAGSSGRALHYSRATKTNMAAQYRNWLPGPFFRDQQIFTGASNITKNNVFSVWEKGKQWELDNRTNLMQPGPAAATTFSGEPDRQAMQNTLAFSRTVYDQTTATTDRNQILITNEDEIRPTNSVGIDAWGAVPTNNQSIVTPGTRAAVNNQGALPGMVWQNRDIYPTGTHLAKIPDTDNHFHPSPLIGRFGCKHPPPQIFIKNTPVPANPSETFQTAKVASFINQYSTGQCTVEIFWELKKETSKRWNPEIQFTSNFGNAADIQFAVSDTGSYSEPRPIGTRYLTKPL

SEQ ID NO: 569 - DNA, 4694 bp, Artificial Sequence
  Description of Artificial Sequence: Synthetic polynucleotide
tggccagtttccaagacaggctcgctcgctcactcgggccggggccccaaaggggcccctagcgaccgcttcgcggtcgcggcccgagtgagcgagcgagcctgtcttggaaactggccagcactccggtgaggtaatgccgtcacgtggtcgggaatgggaacgggaaatctcgcgagaacgtaaacaaatataagacggcgccacacggcgctgcgtcatacgcgcgcgcgcaccggcgagatgaggtcgtactacgaggtcatcgttcagctgcccaacgacgtcgagagtcaggtacctggaatctccgattcgttcgtcaactggattacgtcgcgagaatggacgttgcctgaggacgccgattgggatttggaccaggtcgatcaagttcaactgacgctcggcgacaaaatccaacgggagattcgaactcattgggggacgatggccaaagaaccggactttcactattttatccaactggaacaaggtgaggtgttctttcatttacacgtcctgctggaaacgtgttccgtaaagccgatggtactcggaagatatatccgacatattcaacaaaaaattgtgagtaaagtctactgcgccacgagcctacgatggaaggatggatgcgtggtgaccaagaccaaaaatttcgggggcgcgaacaaggtccgggccgagtcgtatattcccgcctacctgatcccgaaacagcaaccggaagtgcagtgggcgtggactaacgtgcccgagtatataaaagcgtgcttgcaccgagaactgcgtgccagtctcgcgcgacttcacttcgaggaggcgggcgtctcgcaatccaaggaaaatctcgcgagaactgcagacggcgctcccgtgatgccgacccgcgtcagcaaacgctacatggagctcgtggattggctcgtggagaaggggatcaccaccgagaaggaatggctgctggaaaacagagaaagctttcggagctttcaggcctcgagcaactcggcgcgtcagatcaagacggccctgcaaggcgccattcaggagatgcttctgaccaagacggcggaggactacctcgtcggaaaggatcccgtctcggacgacgacatccgtcagaaccgcatctacaagattctggaactgaaccactacgacccagcgtacgtggggagtattttggtcgggtggtgccagaagaaatggggcaagcgaaacacgctgtggctgttcggacatgcgaccaccggcaagaccaacatcgcggaggctattgcccatgctgtgccgttctatggatgcgttaactggaccaacgagaactttccgttcaacgactgcgtcgaaaaaatgattatctggtgggaggagggcaaaatgaccgccaaagtggtggaaacagccaaggcgattctgggaggatctcgggtgagagtggaccaaaaatgcaaagcttcggttccgatcgaaccgacgccggtcattattaccagtaacaccaacatgtgttatgtcatcgacgggaacacgaccacgttcgagcataagcagccgttggaggacaggatgtttaagctcgaattgctgactcggttgcctgatgactttggtaaggtgaccaaacaggaggtgcgtcaattcttcaggtggtctcaggatcacctgacccctgtgatcccagaattcctagtgcggaaggcggagtctcgcaaaagacccgccccttccggggaaggctatataagcccgacaaagcggcccgcgctcgcagagcagcagcaggcgtcggagagcgcggacccggttcccaccaggtatcgtatcaaatgctcgaaacattgcggtatggataaaatgttgtttccttgccaaatttgtgaatcgatgaacagagatattaatatttgtgctattcataaaacgaccgactgtaaagagtgtttccccgactacggggataaagatgatgtagaactacccccctgtacagaacacaacgtgtctcgttgttatcaatgtcattcgggcgaattgtatcgcgtgacttcggactctgacgagaaacctgcccccgagagtgatgaaggcaccgagccatcctatgctccctgcacgattcaccacctgatgggcaagagtcacgggttagtcacttgcgcggcgtgtcggttgaaaaatagtacgttgcatgatgacttggatgacggtgatctcgaacaataaatgattgaaatgtagccatgtctctcatttctgatgcgattccagattggttggagcggttggtcaaaaagggagtgaatgctgcagctgatttctaccatttggaaagcggtcctcctcgtcctaaggcaaatcagcaaactcaagaatctcttgaaaaggacgattcgagaggtctcgtgttcccaggctacaattatctaggccctttcaacggtctagataaaggagaacccgtcaacgaggcagacgctgccgccttagaacacgacaaggcttacgacctcgaaatcaaggacgggcacaacccgtactttgagtacaacgaggccgacagacgtttccaggaacgtctcaaagacgatacctcctttggaggcaatttaggtaaagccatcttccaggccaaaaagagggttctcgaaccctttggtctggtggaagactcaaagacggctccgaccggagacaagcggaaaggcgaagacgaacctcgtttgcccgacacttcttcacagactcccaagaaaaacaagaagcctcgcaaggaaagaccttccggcggggcagaagatccgggcgaaggcacctcttccaacgctggagcagcagcacccgcctctagtgtgggatcatctatcatggctgaaggaggtggcggcccagtgggcgatgcaggccagggtgccgatggagtgggcaattcctccggaaattggcattgcgattcccaatggctggaaaacggagtcgtcactcgaaccacccgaacctgggtcttgcccagctacaacaaccacctgtacaaacgaatccaaggacccagcggaggcgacaacaacaacaaattctttggattcagcaccccctggggatactttgactacaatcgattccactgccacttttccccgcgagactggcaacgactcatcaacaacaactggggcatccgtcccaaagcgatgcgctttagactctttaacatccaggttaaagaggtcacggtccaagacttcaacaccaccatcggcaacaacctcaccagtacggtccaggtctttgcggacaaggactaccaactgccgtacgtcctcggatcggctaccgaaggcaccttcccgccgttcccagcggatatctacacgatcccgcagtacgggtactgcacgctaaactacaacaacgaggcggtggatcgttcggccttctactgtctggactactttccctcagacatgctgcggacaggaaataactttgagtttacttacaccttcgaggacgttcctttccatagcatgtttgcccacaaccagacgctagaccggctgatgaatcccctcgtggatcagtacctctgggctttcagctccgtcagccaagcaggctcatctggacgagctcttcattactcgcgggcgactaaaaccaacatggcggctcaatataggaactggttacctgggcctttcttccgtgatcagcaaatctttacgggcgctagcaacatcactaaaaataacgtctttagcgtttgggaaaaaggcaagcaatgggaactcgacaatcggaccaacctaatgcagcccggtcctgcggcagcgaccacctttagcggagaacctgaccgtcaagccatgcaaaacacgctggcttttagcaggaccgtctacgatcaaacgaccgccacgaccgatcgtaaccagatactcatcaccaacgaagacgaaatcagacccaccaactcggtcggtatcgacgcgtggggagcagttcccaccaacaaccagtcgatcgtgacccccggcactcgcgcggccgtcaacaatcaaggggcgcttcccgggatggtgtggcaaaacagagacatttaccctacagggacccatttggccaaaattcccgacactgacaatcacttccatccgtccccgcttattgggcggtttggctgcaagcatccccctccccagattttcattaaaaacacacccgtccctgccaacccttcggaaacgttccagacggccaaagtggcctccttcatcaaccagtactcgaccggacagtgcaccgtcgaaatcttttgggaactcaagaaggaaacctccaagcgctggaaccccgaaatccagttcacctccaactttggcaacgcggccgacatccagtttgccgtctccgacacgggatcctattccgaacctcgtcccatcggtacccgttaccttaccaaacctctgtaaattaaacccttcaataaaccgtttatgcgtaactgtatttccgtctcctgtcgttattcagtcacatgatgcggcattacctcaccggagtgctggccagtttccaagacaggctcgctcgctcactcgggccggggccccaaaggggcccctagcgaccgcttcgcggtcgcggcccgagtgagcgagcgagcctgtcttggaaactggcca

SEQ ID NO: 570 - DNA, 2211 bp, Artificial Sequence
  Description of Artificial Sequence: Synthetic polynucleotide
atggctgctgatggttatcttccagattggctcgaggacactctctctgaaggaataagacagtggtggaagctcaaacctggcccaccaccaccaaagcccgcagagcggcataaggacgacagcaggggtcttgtgcttcctgggtacaagtacctcggacccttcaacggactcgacaagggagagccggtcaacgaggcagacgcagcggccctcgagcacgacaaggcctacgaccagcagctcaaggccggtgacaacccctacctcaagtacaaccacgccgacgcggagttccagcagcggcttcagggcgacacatcgtttgggggcaacctcggcagagcagtcttccaggccaaaaagagggttcttgaacctcttggtctggttgagcaagcgggtgagacggctcctggaaagaagagaccgttgattgaatccccccagcagcccgactcctccacgggtatcggcaaaaaaggcaagcagccggctaaaaagagactcaattttggtcagactggcgactcagagtcagtccccgacccacaacctctcggagaacctccagcaacccccgctgctgtgggacctactacaatggcttcaggtggtggcgcaccaatggcagacaataacgaaggcgccgacggagtgggtaatgcctcaggaaattggcattgcgattccacatggctgggcgacagagtcatcaccaccagcacccgcacctgggccttgcccacctacaataaccacctctacaagcaaatctccagtgcttcaacgggggccagcaacgacaaccactacttcggctacagcaccccctgggggtattttgacttcaacagattccactgccacttttcaccacgtgactggcagcgactcatcaacaacaattggggattccggcccaagagactcaacttcaaactcttcaacatccaagtcaaggaggtcacgacgaatgatggcgtcacaaccatcgctaataaccttaccagcacggttcaagtcttctcggactcagactatcagctcccgtacgtgctcgggtcggctcacgagggctgcctcccgccgttcccagcagacgtcttcatggtgccacagtatggatacctcaccctgaacaacgggagtcaggcagtaggacgctcttcattttactgcctggagtactttccttctcagatgctgcgtaccggaaacaactttaccttcagctacacttttgaggacgttcctttccacagcagctacgctcacagccagagtctggaccgtctcatgaatcctctcatcgaccagtacctgtattacctgaacagaactcagaatcagtccggaagtgcccaaaacaaggacttgctgtttagccgggggtctccagctggcatgtctgttcagcccaaaaactggctacctggaccctgttatcggcagcagcgcgtttctaaaacaaaaacagacaacaacaacagcaactttacctggactggtgcttcaaaatataaccttaatgggcgtgaatctataatcaaccctggcactgctatggcctcacacaaagacgacaaagacaagttctttcccatgagcggtgtcatgatttttggaaaggagagcgccggagcttcaaacactgcattggacaatgtcatgatcacagacgaagaggaaatcaaagccactaaccccgtggccaccgaaagatttgggactgtggcagtcaatctccagagcagcagcacagaccctgcgaccggagatgtgcatgttatgggagccttacctggaatggtgtggcaagacagagacgtatacctgcagggtcccatttgggccaaaattcctcacacagatggacactttcacccgtctcctcttatgggcggctttggactcaagaacccgcctcctcagatcctcatcaaaaacacgcctgttcctgcgaatcctccggcggagttttcagctacaaagtttgcttcattcatcacccaatactccacaggacaagtgagtgtggaaattgaatgggagctgcagaaagaaaacagcaagcgctggaatcccgaagtgcagtacacatccaattatgcaaaatctgccaacgttgattttactgtggacaacaatggactttatactgagcctcgccccattggcacccgttacctcacccgtcccctgtaa

SEQ ID NO: 571 - protein, 736 aa, Artificial Sequence
  Description of Artificial Sequence: Synthetic polypeptide
MAADGYLPDWLEDTLSEGIRQWWKLKPGPPPPKPAERHKDDSRGLVLPGYKYLGPFNGLDKGEPVNEADAAALEHDKAYDQQLKAGDNPYLKYNHADAEFQQRLQGDTSFGGNLGRAVFQAKKRVLEPLGLVEQAGETAPGKKRPLIESPQQPDSSTGIGKKGKQPAKKRLNFGQTGDSESVPDPQPLGEPPATPAAVGPTTMASGGGAPMADNNEGADGVGNASGNWHCDSTWLGDRVITTSTRTWALPTYNNHLYKQISSASTGASNDNHYFGYSTPWGYFDFNRFHCHFSPRDWQRLINNNWGFRPKRLNFKLFNIQVKEVTTNDGVTTIANNLTSTVQVFSDSDYQLPYVLGSAHEGCLPPFPADVFMVPQYGYLTLNNGSQAVGRSSFYCLEYFPSQMLRTGNNFTFSYTFEDVPFHSSYAHSQSLDRLMNPLIDQYLYYLNRTQNQSGSAQNKDLLFSRGSPAGMSVQPKNWLPGPCYRQQRVSKTKTDNNNSNFTWTGASKYNLNGRESIINPGTAMASHKDDKDKFFPMSGVMIFGKESAGASNTALDNVMITDEEEIKATNPVATERFGTVAVNLQSSSTDPATGDVHVMGALPGMVWQDRDVYLQGPIWAKIPHTDGHFHPSPLMGGFGLKNPPPQILIKNTPVPANPPAEFSATKFASFITQYSTGQVSVEIEWELQKENSKRWNPEVQYTSNYAKSANVDFTVDNNGLYTEPRPIGTRYLTRPL

SEQ ID NO: 572 - DNA, 2211 bp, Artificial Sequence
  Description of Artificial Sequence: Synthetic polynucleotide
atggcttccgatggttatcttccagattggctcgaggacaacctctctgagggcatccgcgagtggtgggacttgaaacctggagccccgaaacccaaagccaaccagcaaaagcaggacgacggccggggtctggtgcttcctggctacaagtacctcggacccttcaacggactcgacaagggggagcccgtcaacgcggcggatgcagcggccctcgagcacgacaaggcctacgaccagcagctcagagcgggtgacaatccgtacctgcggtataaccacgccgacgccgagtttcaggagcgtctgcaagaagatacgtcttttgggggcaacctcgggcgagcagtcttccaggccaagaagagggttctcgaaccttttggtctggttgaggaaggtgctaagacggctcctggaaagaaacgtccggtagagcagtcgccacaagagccagactcctcctcgggcattggcaagacaggccagcagcccgctaaaaagagactcaattttggtcagactggcgactcagagtcagtccccgacccacaacctctcggagaacctccagcaacccccgctgctgtgggacctactacaatggcttcaggcggtggcgcaccaatggcagacaataacgaaggcgccgacggagtgggtaatgcctcaggaaattggcattgcgattccacatggctgggcgacagagtcatcaccaccagcacccgaacatgggccttgcccacctataacaaccacctctacaagcaaatctccagtgcttcaacgggggccagcaacgacaaccactacttcggctacagcaccccctgggggtattttgatttcaacagattccactgccatttctcaccacgtgactggcagcgactcatcaacaacaattggggattccggcccaagagactcaacttcaaactcttcaacatccaagtcaaggaggtcacgacgaatgatggcgtcacaaccatcgctaataaccttaccagcacggttcaagtcttctcggactcggagtaccagcttccgtacgtcctcggctctgcgcaccagggctgcctccctccgttcccggcggacgtgttcatgattccgcagtacggctacctaacgctcaacaatggcagccaggcagtgggacggtcatccttttactgcctggaatatttcccatcgcagatgctgagaacgggcaataactttaccttcagctacaccttcgaggacgtgcctttccacagcagctacgcgcacagccagagcctggaccggctgatgaatcctctcatcgaccagtacctgtattacctgaacagaactcagaatcagtccggaagtgcccaaaacaaggacttgctgtttagccgggggtctccagctggcatgtctgttcagcccaaaaactggctacctggaccctgttaccggcagcagcgcgtttctaaaacaaaaacagacaacaacaacagcaactttacctggactggtgcttcaaaatataaccttaatgggcgtgaatctataatcaaccctggcactgctatggcctcacacaaagacgacaaagacaagttctttcccatgagcggtgtcatgatttttggaaaggagagcgccggagcttcaaacactgcattggacaatgtcatgatcacagacgaagaggaaatcaaagccactaaccccgtggccaccgaaagatttgggactgtggcagtcaatctccagagcagcagcacagaccctgcgaccggagatgtgcatgttatgggagccttacctggaatggtgtggcaagacagagacgtatacctgcagggtcccatttgggccaaaattcctcacacagatggacactttcacccgtctcctcttatgggcggctttggacttaagcacccgcctcctcagatcctcatcaaaaacacgcctgttcctgcgaatcctccggcagagttttcggctacaaagtttgcttcattcatcacccagtattctactggccaagtcagcgtggagattgaatgggagctgcagaaagaaaacagcaaacgctggaatcccgaagtgcagtatacatctaactatgcaaaatctgccaacgttgatttcactgtggacaacaatggactttatactgagcctcgtcccattggcacccgttacctcacccgtcccctgtaa

SEQ ID NO: 573 - protein, 736 aa, Artificial Sequence
  Description of Artificial Sequence: Synthetic polypeptide
MASDGYLPDWLEDNLSEGIREWWDLKPGAPKPKANQQKQDDGRGLVLPGYKYLGPFNGLDKGEPVNAADAAALEHDKAYDQQLRAGDNPYLRYNHADAEFQERLQEDTSFGGNLGRAVFQAKKRVLEPFGLVEEGAKTAPGKKRPVEQSPQEPDSSSGIGKTGQQPAKKRLNFGQTGDSESVPDPQPLGEPPATPAAVGPTTMASGGGAPMADNNEGADGVGNASGNWHCDSTWLGDRVITTSTRTWALPTYNNHLYKQISSASTGASNDNHYFGYSTPWGYFDFNRFHCHFSPRDWQRLINNNWGFRPKRLNFKLFNIQVKEVTTNDGVTTIANNLTSTVQVFSDSEYQLPYVLGSAHQGCLPPFPADVFMIPQYGYLTLNNGSQAVGRSSFYCLEYFPSQMLRTGNNFTFSYTFEDVPFHSSYAHSQSLDRLMNPLIDQYLYYLNRTQNQSGSAQNKDLLFSRGSPAGMSVQPKNWLPGPCYRQQRVSKTKTDNNNSNFTWTGASKYNLNGRESIINPGTAMASHKDDKDKFFPMSGVMIFGKESAGASNTALDNVMITDEEEIKATNPVATERFGTVAVNLQSSSTDPATGDVHVMGALPGMVWQDRDVYLQGPIWAKIPHTDGHFHPSPLMGGFGLKHPPPQILIKNTPVPANPPAEFSATKFASFITQYSTGQVSVEIEWELQKENSKRWNPEVQYTSNYAKSANVDFTVDNNGLYTEPRPIGTRYLTRPL

SEQ ID NO: 574 - DNA, 2211 bp, Artificial Sequence
  Description of Artificial Sequence: Synthetic polynucleotide
atggctgctgatggttatcttccagattggctcgaggacactctctctgaaggaataagacagtggtggaagctcaaacctggcccaccaccaccaaagcccgcagagcggcataaggacgacagcaggggtcttgtgcttcctgggtacaagtacctcggacccttcaacggactcgacaagggagagccggtcaacgaggcagacgcagcggccctcgagcacgacaaggcctacgaccagcagctcaaggccggtgacaacccctacctcaagtacaaccacgccgacgcggagttccagcagcggcttcagggcgacacatcgtttgggggcaacctcggcagagcagtcttccaggccaaaaagagggttcttgaacctcttggtctggttgagcaagcgggtgagacggctcctggaaagaagagaccgttgattgaatccccccagcagcccgactcctccacgggtatcggcaaaaaaggcaagcagccggctaaaaagagactcaattttggtcagactggcgactcagagtcagtccccgacccacaacctctcggagaacctccagcaacccccgctgctgtgggacctactacaatggcttcaggtggtggcgcaccaatggcagacaataacgaaggcgccgacggagtgggtaatgcctcaggaaattggcattgcgattccacatggctgggcgacagagtcatcaccaccagcacccgcacctgggccttgcccacctacaataaccacctctacaagcaaatctccagtgcttcaacgggggccagcaacgacaaccactacttcggctacagcaccccctgggggtattttgacttcaacagattccactgccacttttcaccacgtgactggcagcgactcatcaacaacaattggggattccggcccaagagactcaacttcaaactcttcaacatccaagtcaaggaggtcacgacgaatgatggcgtcacaaccatcgctaataaccttaccagcacggttcaagtcttctcggactcagactatcagctcccgtacgtgctcgggtcggctcacgagggctgcctcccgccgttcccagcagacgtcttcatggtgccacagtatggatacctcaccctgaacaacgggagtcaggcagtaggacgctcttcattttactgcctggagtactttccttctcagatgctgcgtaccggaaacaactttaccttcagctacacttttgaggacgttcctttccacagcagctacgctcacagccagagtctggaccgtctcatgaatcctctcatcgaccagtacctgtattacctgaacagaactcagaatcagtccggaagtgcccaaaacaaggacttgctgtttagccgggggtctccaactggcatgtctgttcagcccaaaaactggctacctggaccctgttatcggcagcagcgcgtttctaaaacaaaaacagacaacaacaacagcaactttacctggactggtgcttcaaaatataaccttaatgggcgtgaatctataatcaaccctggcactgctatggcctcacacaaagacgacaaagacaagttctttcccatgagcggtgtcatgatttttggaaaggagagcgccggagcttcaaacactgcattggacaatgtcatgatcacagacgaagaggaaatcaaagccactaaccccgtggccactgaaagatttgggactgtggcagtcaatctccagagcagcagcacagaccctgcgaccggagatgtgcatgccatgggagccttacctggaatggtgtggcaagacagagacgtatacctgcagggtcctatttgggccaaaattcctcacacggatggacactttcacccgtctcctctcatgggcggctttggactcaagaacccgcctcctcagatcctcatcaaaaacacgcctgttcctgcgaatcctccggcggagttttcagctacaaagtttgcttcattcatcacccagtattccacaggacaagtgagcgtggagattgaatgggagctgcagaaagaaaacagcaaacgctggaatcccgaagtgcagtatacatctaactatgcaaaatctgccaacgttgatttcactgtggacaacaatggactttatactgagcctcgccccattggcacccgttacctcacccgtcccctgtaa

SEQ ID NO: 575 - protein, 736 aa, Artificial Sequence
  Description of Artificial Sequence: Synthetic polypeptide
MAADGYLPDWLEDTLSEGIRQWWKLKPGPPPPKPAERHKDDSRGLVLPGYKYLGPFNGLDKGEPVNEADAAALEHDKAYDQQLKAGDNPYLKYNHADAEFQQRLQGDTSFGGNLGRAVFQAKKRVLEPLGLVEQAGETAPGKKRPLIESPQQPDSSTGIGKKGKQPAKKRLNFGQTGDSESVPDPQPLGEPPATPAAVGPTTMASGGGAPMADNNEGADGVGNASGNWHCDSTWLGDRVITTSTRTWALPTYNNHLYKQISSASTGASNDNHYFGYSTPWGYFDFNRFHCHFSPRDWQRLINNNWGFRPKRLNFKLFNIQVKEVTTNDGVTTIANNLTSTVQVFSDSDYQLPYVLGSAHEGCLPPFPADVFMVPQYGYLTLNNGSQAVGRSSFYCLEYFPSQMLRTGNNFTFSYTFEDVPFHSSYAHSQSLDRLMNPLIDQYLYYLNRTQNQSGSAQNKDLLFSRGSPTGMSVQPKNWLPGPCYRQQRVSKTKTDNNNSNFTWTGASKYNLNGRESIINPGTAMASHKDDKDKFFPMSGVMIFGKESAGASNTALDNVMITDEEEIKATNPVATERFGTVAVNLQSSSTDPATGDVHAMGALPGMVWQDRDVYLQGPIWAKIPHTDGHFHPSPLMGGFGLKNPPPQILIKNTPVPANPPAEFSATKFASFITQYSTGQVSVEIEWELQKENSKRWNPEVQYTSNYAKSANVDFTVDNNGLYTEPRPIGTRYLTRPL

SEQ ID NO: 576 - DNA, 2211 bp, Artificial Sequence
  Description of Artificial Sequence: Synthetic polynucleotide
atggctgccgatggttatcttccagattggctcgaggacaacctctctgagggcattcgcgagtggtgggcgctgaaacctggagccccgaagcccaaagccaaccagcaaaagcaggacgacggccggggtctggtgcttcctggctacaagtacctcggacccttcaacggactcgacaagggggagcccgtcaacgcggcggatgcagcggccctcgagcacgacaaggcctacgaccagcagctcaaagcgggtgacaatccgtacctgcggtataaccacgccgacgccgagtttcaggagcgtctgcaagaagatacgtcttttgggggcaacctcgggcgagcagtcttccaggccaagaagcgggttctcgaacctctcggtctggttgaggaaggcgctaagacggctcctggaaagaaacgtccggtagagcaatcgccacaagagccagactcctcctcgggcatcggcaagacaggccagcagcccgctaaaaagagactcaattttggtcagactggcgactcagagtcagtccccgacccacaacctctcggagaacctccagcaacccccgctgctgtgggacctactacaatggcttcaggcggtggcgcaccaatggcagacaataacgaaggcgccgacggagtgggtaatgcctcaggaaattggcattgcgattccacatggctgggcgacagagtcatcaccaccagcacccgaacatgggccttgcccacctataacaaccacctctacaagcaaatctccagtgcttcgacgggggccagcaacgacaaccactacttcggctacagcaccccctgggggtattttgactttaacagattccactgccacttttcaccacgtgactggcagcgactcatcaacaacaactggggattccggcccaagagactcagcttcaagctcttcaacatccaggtcaaggaggtcacgacgaatgatggcgtcacaaccatcgctaataaccttaccagcacggttcaagtcttctcggactcggagtaccagcttccgtacgtcctcggctctgcgcaccagggctgcctccctccgttcccggcggacgtgttcatgattccgcaatacggctacctgacgctcaacaatggcagccaagccgtgggacgttcatccttttactgcctggaatatttcccttctcagatgctgagaacgggcaacaactttaccttcagctacacctttgaggaagtgcctttccacagcagctacgcgcacagccagagcctggaccggctgatgaatcctctcatcgatcaatacctgtattacctgaacagaactcaaaatcagtccggaagtgcccaaaacaaggacttgctgtttagccgtgggtctccagctggcatgtctgttcagcccaaaaactggctacctggaccctgttatcggcagcagcgcgtttctaaaacaaaaacagacaacaacaacagcaattttacctggactggtgcttcaaaatataacctcaatgggcgtgaatccatcatcaaccctggcactgctatggcctcacataaagacgacgaagacaagttctttcccatgagcggtgtcatgatttttggaaaagagagcgccggagcttcaaacactgcattggacaatgtcatgattacagacgaagaggaaattaaagccactaaccctgtggccaccgaaagatttgggaccgtggcagtcaatttccagagcagcagcacagaccctgcgaccggagatgtgcatgctatgggagcattacctggcatggtgtggcaagatagagacgtgtacctgcagggtcccatttgggccaaaattcctcacacagatggacactttcacccgtctcctcttatgggcggctttggactcaagaacccgcctcctcagatcctcatcaaaaacacgcctgttcctgcgaatcctccggcggagttttcagctacaaagtttgcttcattcatcacccaatactccacaggacaagtgagcgtggagattgaatgggagctgcagaaagaaaacagcaaacgctggaatcccgaagtgcagtatacatctaactatgcaaaatctgccaacattgatttcactgtggacaacaatggactttatactgagcctcgccccattggcacccgttacctcacccgtccccagtaa

SEQ ID NO: 577 - protein, 736 aa, Artificial Sequence
  Description of Artificial Sequence: Synthetic polypeptide
MAADGYLPDWLEDNLSEGIREWWALKPGAPKPKANQQKQDDGRGLVLPGYKYLGPFNGLDKGEPVNAADAAALEHDKAYDQQLKAGDNPYLRYNHADAEFQERLQEDTSFGGNLGRAVFQAKKRVLEPLGLVEEGAKTAPGKKRPVEQSPQEPDSSSGIGKTGQQPAKKRLNFGQTGDSESVPDPQPLGEPPATPAAVGPTTMASGGGAPMADNNEGADGVGNASGNWHCDSTWLGDRVITTSTRTWALPTYNNHLYKQISSASTGASNDNHYFGYSTPWGYFDFNRFHCHFSPRDWQRLINNNWGFRPKRLSFKLFNIQVKEVTTNDGVTTIANNLTSTVQVFSDSEYQLPYVLGSAHQGCLPPFPADVFMIPQYGYLTLNNGSQAVGRSSFYCLEYFPSQMLRTGNNFTFSYTFEEVPFHSSYAHSQSLDRLMNPLIDQYLYYLNRTQNQSGSAQNKDLLFSRGSPAGMSVQPKNWLPGPCYRQQRVSKTKTDNNNSNFTWTGASKYNLNGRESIINPGTAMASHKDDEDKFFPMSGVMIFGKESAGASNTALDNVMITDEEEIKATNPVATERFGTVAVNFQSSSTDPATGDVHAMGALPGMVWQDRDVYLQGPIWAKIPHTDGHFHPSPLMGGFGLKNPPPQILIKNTPVPANPPAEFSATKFASFITQYSTGQVSVEIEWELQKENSKRWNPEVQYTSNYAKSANIDFTVDNNGLYTEPRPIGTRYLTRPQ

SEQ ID NO: 578 - DNA, 2211 bp, Artificial Sequence
  Description of Artificial Sequence: Synthetic polynucleotide
atggctgccgatggttatcttccagattggctcgaggacaacctctctgagggcattcgcgagtggtgggacttgaaacctggagccccgaaacccaaagccaaccagcaaaagcaggacgacggccggggtctggtgcttcctggctacaagtacctcggacccttcaacggactcgacaagggggagcccgtcaacgcggcggatgcagcggccctcgagcacgacaaggcctacgaccagcagctcaaagcgggtgacaatccgtaccttcggtataaccacgccgacgccgagtttcaggagcgtctgcaagaagatacgtcttttgggggcaacctcgggcgagcagtcttccaggccaaaaagagggttctcgaacctctcggtctggttgaggaagcggctaagacggctcctggaaagaaacgtccggtagagcagtcgccacaagagccagactcctcctcgggcattggcaagacaggccagcagcccgctaaaaagagactcaattttggtcagactggcgactcagagtcagtccccgacccacaacctctcggagaacctcccgcagccccctcaggtgtgggatctcttacaatggcttcaggtggtggcgcaccaatggcagacaataacgaaggcgccgacggagtgggtaatgcctcaggaaattggcattgcgattccacatggctgggcgacagagtcatcaccaccagcacccgcacctgggccttgcccacctacaataaccacctctacaagcaaatctccagtgcttcaacgggggccagcaacgacaaccactacttcggctacagcaccccctgggggtattttgacttcaacagattccactgccacttttcaccacgtgactggcaaagactcatcaacaacaattggggattccggcccaagagactcaacttcaagctcttcaacatccaagtcaaggaggtcacgacgaatgatggcgtcacgaccatcgctaataaccttaccagcacggttcaagtcttctcggactcggagtaccagttgccgtacgtcctcggctctgcgcaccagggctgcctccctccgttcccggcggacgtgttcatgattccgcagtacggctacctaacgctcaacaatggcagccaggcagtgggacggtcatccttttactgcctggaatatttcccatcgcagatgctgagaacgggcaacaactttaccttcagctacacctttgaggaagtgcctttccacagcagctacgcgcacagccagagcctggaccggctgatgaatcctctcatcgaccagtacctgtattacctgaacagaactcaaaatcagtccggaagtgcccaaaacaaggacttgctgtttagccgtgggtctccagctggcatgtctgttcagcccaaaaactggctacctggaccctgttaccggcagcagtgcgtttctaaaacaaaaacagacaacaacaacagcaactttacctggactggtgcttcaaaatataaccttaatgggcgtgaatctataatcaaccctggcactgctatggcctcacacaaagacgacaaagacaagttctttcccatgagcggtgtcatgatttttggaaaggagagcgccggagcttcaaacactgcattggacaatgtcatgatcacagacgaagaggaaatcaaagccactaaccccgtggccaccgaaagatttgggactgtggcagtcaatctccagagcagcagcacagaccctgcgaccggagatgtgcatgttatgggagccttacctggaatggtgtggcaagacagagacgtatacctgcagggtcctatttgggccaaaattcctcacacagatggacactttcacccgtctcctcttatgggcggctttggactcaagaacccgcctcctcagatcctcatcaaaaacacgcctgttcctgcgaatcctccggcggagttttcagctacaaagtttgcttcattcatcacccaatactccacaggacaagtgagcgtggagattgaatgggagctgcagaaagaaaacagcaagcgctggaatcccgaagtgcagtacacatccaattatgcaaaatctgccaacgttgatttcactgtggacaacaatggactttatactgagcctcgccccattggcacccgttacctcacccgtcccctgtaa

SEQ ID NO: 579 - protein, 736 aa, Artificial Sequence
  Description of Artificial Sequence: Synthetic polypeptide
MAADGYLPDWLEDNLSEGIREWWDLKPGAPKPKANQQKQDDGRGLVLPGYKYLGPFNGLDKGEPVNAADAAALEHDKAYDQQLKAGDNPYLRYNHADAEFQERLQEDTSFGGNLGRAVFQAKKRVLEPLGLVEEAAKTAPGKKRPVEQSPQEPDSSSGIGKTGQQPAKKRLNFGQTGDSESVPDPQPLGEPPAAPSGVGSLTMASGGGAPMADNNEGADGVGNASGNWHCDSTWLGDRVITTSTRTWALPTYNNHLYKQISSASTGASNDNHYFGYSTPWGYFDFNRFHCHFSPRDWQRLINNNWGFRPKRLNFKLFNIQVKEVTTNDGVTTIANNLTSTVQVFSDSEYQLPYVLGSAHQGCLPPFPADVFMIPQYGYLTLNNGSQAVGRSSFYCLEYFPSQMLRTGNNFTFSYTFEEVPFHSSYAHSQSLDRLMNPLIDQYLYYLNRTQNQSGSAQNKDLLFSRGSPAGMSVQPKNWLPGPCYRQQCVSKTKTDNNNSNFTWTGASKYNLNGRESIINPGTAMASHKDDKDKFFPMSGVMIFGKESAGASNTALDNVMITDEEEIKATNPVATERFGTVAVNLQSSSTDPATGDVHVMGALPGMVWQDRDVYLQGPIWAKIPHTDGHFHPSPLMGGFGLKNPPPQILIKNTPVPANPPAEFSATKFASFITQYSTGQVSVEIEWELQKENSKRWNPEVQYTSNYAKSANVDFTVDNNGLYTEPRPIGTRYLTRPL

SEQ ID NO: 580 - DNA, 2211 bp, Artificial Sequence
  Description of Artificial Sequence: Synthetic polynucleotide
atggctgccgatggttatcttccagattggctcgaggacaacctctctgagggcattcgcgaatggtgggacttgaaacctggagccccgaaacccaaagtcaaccagcaaaagcaggacaacgctcggggtcttgtgcttccgggttacaaatacctcggacccttcaacggactcgacaagggggagcccgtcaacgcggcggacgcagcggccctcgagcacgacaaggcctacgaccagcagctcaaagcgggtgacaatccgtaccttcggtataaccacgccgacgccgagtttcaggagcgtctgcaagaagatacgtcttttgggggcaaccttggacgagcagtcttccaggccaagaagagggttctcgaaccttttggtctggttgaggaaggtgctaagacggctcctggaaagaaacgtccggtagagcagtcgccacaagagccagactcctcctcgggcattggcaagacaggccagcagcccgctaaaaagagactcaattttggtcagactggcgactcagagtcagtccccgacccacaacctctcggagaacctccagcaacccccgctgctgtgggacctactacaatggcttcaggcggtggcgcaccaatggcagacaataacgaaggcgccgacggagtgggtaatgcctcaggaaattggcattgcgattccacatggctgggcgacagagtcatcaccaccagcacccgcacctgggccttgcccacctacaataaccacctctacaagcaaatctccagtgcttcaacgggggccagcaacgacaaccactacttcggctacagcaccccctgggggtattttgacttcaacagattccactgccacttttcaccacgtgactggcaaagactcatcaacaacaattggggattccggcccaagagactcaacttcaagctcttcaacatccaagtcaaggaggtcacgacgaatgatggcgtcacgaccatcgctaataaccttaccagcacggttcaagtcttctcggactcggagtaccagttgccgtacgtcctcggctctgcgcaccagggctgcctccctccgttcccggcggacgtgttcatgattccgcaatacggctacctgacgctcaacaatggcagccaggcagtgggacggtcatccttttactgcctggaatatttcccatcgcagatgctgagaacgggcaataactttaccttcagctacacttttgaggacgttcctttccacagcagctacgctcacagccagagcctggaccggctgatgaatcctctcatcgaccagtacctgtattacctgaacagaactcagaatcagtccggaagtgcccaaaacaaggacttgctgtttagccgtgggtctccaactggcatgtctgttcagcccaaaaactggctacctggaccctgttatcggcagcagcgcgtttctaaaacaaaaacagacaacaacaacagcaactttacctggactggtgcttcaaaatataaccttaatgggcgtgaatctataatcaaccctggcactgctatggcctcacacaaagacgacgaagacaagttctttcccatgagcggtgtcatgatttttggaaaggagagcgccggagcttcaaacactgcattggacaatgtcatgatcacagacgaagaggaaatcaaagccactaaccccgtggccactgaaagatttgggactgtggcagtcaatctccagagcagcagcacagaccctgcgaccggagatgtgcatgccatgggagccttacctggaatggtgtggcaagacagagacgtatacctgcagggtcctatttgggccaaaattcctcacacggatggacactttcacccgtctcctctcatgggcggctttggacttaagcacccgcctcctcagatcctcatcaaaaacacgcctgttcctgcgaatcctccggcagagttttcggctacaaagtttgcttcattcatcacccagtattccacaggacaagtgagcgtggagattgaatgggagctgcagaaagaaaacagcaaacgctggaatcccgaagtgcagtatacatctaactatgcaaaatctgccaacgttgatttcactgtggacaacaatggactttatactgagcctcgccccattggcacccgttacctcacccgtcccctgtaa

SEQ ID NO: 581 - protein, 736 aa, Artificial Sequence
  Description of Artificial Sequence: Synthetic polypeptide
MAADGYLPDWLEDNLSEGIREWWDLKPGAPKPKVNQQKQDNARGLVLPGYKYLGPFNGLDKGEPVNAADAAALEHDKAYDQQLKAGDNPYLRYNHADAEFQERLQEDTSFGGNLGRAVFQAKKRVLEPFGLVEEGAKTAPGKKRPVEQSPQEPDSSSGIGKTGQQPAKKRLNFGQTGDSESVPDPQPLGEPPATPAAVGPTTMASGGGAPMADNNEGADGVGNASGNWHCDSTWLGDRVITTSTRTWALPTYNNHLYKQISSASTGASNDNHYFGYSTPWGYFDFNRFHCHFSPRDWQRLINNNWGFRPKRLNFKLFNIQVKEVTTNDGVTTIANNLTSTVQVFSDSEYQLPYVLGSAHQGCLPPFPADVFMIPQYGYLTLNNGSQAVGRSSFYCLEYFPSQMLRTGNNFTFSYTFEDVPFHSSYAHSQSLDRLMNPLIDQYLYYLNRTQNQSGSAQNKDLLFSRGSPTGMSVQPKNWLPGPCYRQQRVSKTKTDNNNSNFTWTGASKYNLNGRESIINPGTAMASHKDDEDKFFPMSGVMIFGKESAGASNTALDNVMITDEEEIKATNPVATERFGTVAVNLQSSSTDPATGDVHAMGALPGMVWQDRDVYLQGPIWAKIPHTDGHFHPSPLMGGFGLKHPPPQILIKNTPVPANPPAEFSATKFASFITQYSTGQVSVEIEWELQKENSKRWNPEVQYTSNYAKSANVDFTVDNNGLYTEPRPIGTRYLTRPL

SEQ ID NO: 582 - DNA, 2208 bp, Artificial Sequence
  Description of Artificial Sequence: Synthetic polynucleotide
  modified_base (955)..(955): n is a c, t, or g
  misc_feature (955)..(955): n is a, c, g, or t
  modified_base (971)..(972): n is a c, t, or g
  misc_feature (971)..(972): n is a, c, g, or t
  modified_base (981)..(981): n is a c, t, or g
  misc_feature (981)..(981): n is a, c, g, or t
  modified_base (986)..(986): n is a c, t, or g
  misc_feature (986)..(986): n is a, c, g, or t
  modified_base (1235)..(1235): n is a c, t, or g
  misc_feature (1235)..(1235): n is a, c, g, or t
  modified_base (1694)..(1696): n is a c, t, or g
  misc_feature (1694)..(1696): n is a, c, g, or t
  modified_base (1698)..(1698): n is a c, t, or g
  misc_feature (1698)..(1698): n is a, c, g, or t
  modified_base (1763)..(1765): n is a c, t, or g
  misc_feature (1763)..(1765): n is a, c, g, or t
  modified_base (1778)..(1778): n is a c, t, or g
  misc_feature (1778)..(1778): n is a, c, g, or t
  modified_base (2204)..(2204): n is a c, t, or g
  misc_feature (2204)..(2204): n is a, c, g, or t
atggctgccgatggttatcttccagattggctcgaggacaacctctctgagggcattcgcgaatggtgggacttgaaacctggagccccgaaacccaaagtcaaccagcaaaagcaggacaacgctcggggtcttgtgcttccgggttacaaatacctcggacccttcaacggactcgacaagggggagcccgtcaacgcggcggacgcagcggccctcgagcacgacaaggcctacgaccagcagctcaaagcgggtgacaatccgtaccttcggtataaccacgccgacgccgagtttcaggagcgtctgcaagaagatacgtcttttgggggcaaccttggacgagcagtcttccaggccaagaagagggttctcgaaccttttggtctggttgaggaaggtgctaagacggctcctggaaagaaacgtccggtagagcagtcgccacaagagccagactcctcctcgggcattggcaagacaggccagcagcccgctaaaaagagactcaattttggtcagactggcgactcagagtcagtccccgacccacaacctctcggagaacctccagcaacccccgctgctgtgggacctactacaatggcttcaggcggtggcgcaccaatggcagacaataacgaaggcgccgacggagtgggtaatgcctcaggaaattggcattgcgattccacatggctgggcgacagagtcatcaccaccagcacccgaacatgggccttgcccacctataacaaccacctctacaagcaaatctccagtgcttcaacgggggccagcaacgacaaccactacttcggctacagcaccccctgggggtattttgatttcaacagattccactgccacttttcaccacgtgactggcagcgactcatcaataacaattggggattccggcccaagagactcaacttcaaactcttcaacntccaagtcaaggaggnnacgacgaangatgncgtcacaaccatcgctaataaccttaccagcacggttcaagtcttctcggactcggagtaccagcttccgtacgtcctcggctctgcgcaccagggctgcctccctccgttcccggcggacgtgttcatgattccgcaatacggctacctgacgctcaacaatggcagccaggcagtgggacggtcatccttttactgcctggaatatttcccatcgcagatgctgagaacgggcaataactttacctncagctacacttttgaggacgttcctttccacagcagctacgctcacagccagagcctggaccggctgatgaatcctctcatcgaccagtacctgtattacctgaacagaactcagaatcagtccggaagtgcccaaaacaaggacttgctgtttagccgtgggtctccaactggcatgtctgttcagcccaaaaactggctacctggaccctgttatcggcagcagcgcgtttctaaaacaaaaacagacaacaacaacagcaactttacctggactggtgcttcaaaatataaccttaatgggcgtgaatctataatcaaccctggcactgctatggcctcacacaaagacgacgaagacaagttctttcccatgagcggtgtcatgatttttggaaaggagagcgccggagcttcaaacactgcattggacaatgtcatgatcacagacgaagagannncnaagccactaaccccgtggccactgaaagatttgggactgtggcagtcaatctccaagcagcacannnaccctgcgaccgnagatgtgcatgccatgggagccttacctggaatggtgtggcaagacagagacgtatacctgcagggtcctatttgggccaaaattcctcacacggatggacactttcacccgtctcctctcatgggcggctttggacttaagcacccgcctcctcagatcctcatcaaaaacacgcctgttcctgcgaatcctccggcagagttttcggctacaaagtttgcttcattcatcacccagtattccacaggacaagtgagcgtggagattgaatgggagctgcagaaagaaaacagcaaacgctggaatcccgaagtgcagtatacatctaactatgcaaaatctgccaacgttgatttcactgtggacaacaatggactttatactgagcctcgccccattggcacccgttacctcacccgtccccngtaa

SEQ ID NO: 583 - protein, 723 aa, Artificial Sequence
  Description of Artificial Sequence: Synthetic polypeptide
MAADGYLPDWLEDNLSEGIREWWDLKPGAPKPKVNQQKQDNARGLVLPGYKYLGPFNGLDKGEPVNAADAAALEHDKAYDQQLKAGDNPYLRYNHADAEFQERLQEDTSFGGNLGRAVFQAKKRVLEPFGLVEEGAKTAPGKKRPVEQSPQEPDSSSGIGKTGQQPAKKRLNFGQTGDSESVPDPQPLGEPPATPAAVGPTTMASGGGAPMADNNEGADGVGNASGNWHCDSTWLGDRVITTSTRTWALPTYNNHLYKQISSASTGASNDNHYFGYSTPWGYFDFNRFHCHFSPRDWQRLINNNWGFRPKRLNFKLFNQVKETTDVTTIANNLTSTVQVFSDSEYQLPYVLGSAHQGCLPPFPADVFMIPQYGYLTLNNGSQAVGRSSFYCLEYFPSQMLRTGNNFTSYTFEDVPFHSSYAHSQSLDRLMNPLIDQYLYYLNRTQNQSGSAQNKDLLFSRGSPTGMSVQPKNWLPGPCYRQQRVSKTKTDNNNSNFTWTGASKYNLNGRESIINPGTAMASHKDDEDKFFPMSGVMIFGKESAGASNTALDNVMITDEEATNPVATERFGTVAVNLQSSPATDVHAMGALPGMVWQDRDVYLQGPIWAKIPHTDGHFHPSPLMGGFGLKHPPPQILIKNTPVPANPPAEFSATKFASFITQYSTGQVSVEIEWELQKENSKRWNPEVQYTSNYAKSANVDFTVDNNGLYTEPRPIGTRYLTRP

SEQ ID NO: 584 - DNA, 2208 bp, Artificial Sequence
  Description of Artificial Sequence: Synthetic polynucleotide
atggctgccgatggttatcttccagattggctcgaggacactctctctgaaggaataagacagtggtggaagctcaaacctggcccaccaccaccaaagcccgcagagcggcataaggacgacagcaggggtcttgtgcttcctgggtacaagtacctcggacccttcaacggactcgacaagggagagccggtcaacgaggcagacgccgcggccctcgagcacgacaaagcctatgaccggcagctcgacagcggagacaacccgtacctcaagtacaaccacgccgacgcggagtttcaggagcgccttaaagaagatacgtcttttgggggcaacctcggacgagcagtcttccaggcgaaaaagagggttcttgaacctctgggcctggttgaggaacctgttaagacggctccgggaaaaaagaggccggtagagcactctcctgtggagccagactcctcctcgggaaccggaaaggcgggtcagcagcctgcaagaaaaagattgaattttggtcagactggagacgcagactcagtacctgacccccagcctctcggacagccaccagcagccccctctggtctgggaactaatacgatggctacaggcagtggcgcaccaatggcagacaataacgagggcgccgacggagtgggtaattcctcgggaaattggcattgcgattccacatggatgggcgacagagtcatcaccaccagcacccgaacctgggccctgcccacctacaacaaccacctctacaaacaaatttccagccaatcaggagcctcgaacgacaatcactactttggctacagcaccccttgggggtattttgacttcaacagattccactgccacttttcaccacgtgactggcaaagactcatcaacaacaactggggattccgacccaagagactcaagttcaagctctttaacattcaagtcaaagaggtcacgcagaatgacggtacgacgacgattgccaataaccttaccagcacggttcaggtgtttactgactcggagtaccagctcccgtacgtcctcggctcggcgcatcaaggatgcctcccgccgttcccagcagacgtcttcatggtgccacagtatggatacctcaccctgaacaacgggagtcaggcagtaggacgctcttcattttactgcctggagtactttccttctcagatgctgcgtaccggtaacaactttaccttcagctacacttttgaggacgttcctttccacagcagctacgctcacagccagagtctggaccgtctcatgaatcctctcatcgaccagtacctgtattacttgagcagaacagacgctccaagtggaaccaccacgcagtcaaggcttcagttttctcaggccggagcgagtgacattcgggaccagtctaggaactggcttcctggaccctgttaccgccagcagcgagtatcaaagacatctgcggataacaacaacagtgaatactcgtggactggagctaccaagtaccacctcaatggcagagactctctggtgaatccgggcccggccatggcaagccacaaggacgatgaagaaaagttttttcctcagagcggggttctcatctttgggaagcaaggctcagagaaaacaagtgtggacattgaaaaggtcatgattacagacgaagaggaaatcaggacaaccaatcccgtggctacggagcagtatggttctgtatctaccaacctccagagaggcaacagacaagcagctaccgcagatgtcaacacacaaggcgttcttccaggcatggtctggcaggacagagatgtgtaccttcaggggcccatctgggcaaagattccacacacggacggacattttcacccctctcccctcatgggtggattcggacttaaacaccctcctccacagattctcatcaagaacaccccggtacctgcgaatccttcgaccaccttcagtgcggcaaagtttgcttccttcatcacacagtactccacgggacaggtcagcgtggagatcgagtgggagctgcagaaggaaaacagcaaacgctggaatcccgaagttcagtacacttccaactacaacaagtctgttaatgtggactttactgtggacactaatggcgtgtattcagagcctcgccccattggcaccagatacctgactcgtaatctgtaa

SEQ ID NO: 585 - protein, 735 aa, Artificial Sequence
  Description of Artificial Sequence: Synthetic polypeptide
MAADGYLPDWLEDTLSEGIRQWWKLKPGPPPPKPAERHKDDSRGLVLPGYKYLGPFNGLDKGEPVNEADAAALEHDKAYDRQLDSGDNPYLKYNHADAEFQERLKEDTSFGGNLGRAVFQAKKRVLEPLGLVEEPVKTAPGKKRPVEHSPVEPDSSSGTGKAGQQPARKRLNFGQTGDADSVPDPQPLGQPPAAPSGLGTNTMATGSGAPMADNNEGADGVGNSSGNWHCDSTWMGDRVITTSTRTWALPTYNNHLYKQISSQSGASNDNHYFGYSTPWGYFDFNRFHCHFSPRDWQRLINNNWGFRPKRLKFKLFNIQVKEVTQNDGTTTIANNLTSTVQVFTDSEYQLPYVLGSAHQGCLPPFPADVFMVPQYGYLTLNNGSQAVGRSSFYCLEYFPSQMLRTGNNFTFSYTFEDVPFHSSYAHSQSLDRLMNPLIDQYLYYLSRTDAPSGTTTQSRLQFSQAGASDIRDQSRNWLPGPCYRQQRVSKTSADNNNSEYSWTGATKYHLNGRDSLVNPGPAMASHKDDEEKFFPQSGVLIFGKQGSEKTSVDIEKVMITDEEEIRTTNPVATEQYGSVSTNLQRGNRQAATADVNTQGVLPGMVWQDRDVYLQGPIWAKIPHTDGHFHPSPLMGGFGLKHPPPQILIKNTPVPANPSTTFSAAKFASFITQYSTGQVSVEIEWELQKENSKRWNPEVQYTSNYNKSVNVDFTVDTNGVYSEPRPIGTRYLTRNL

SEQ ID NO: 586 - DNA, 2208 bp, Artificial Sequence
  Description of Artificial Sequence: Synthetic polynucleotide
atggctgccgatggttatcttccagattggctcgaggacactctctctgaaggaataagacagtggtggaagctcaaacctggcccaccaccaccaaagcccgcagagcggcataaggacgacagcaggggtcttgtgcttcctgggtacaagtacctcggacccttcaacggactcgacaagggagagccggtcaacgaggcagacgccgcggccctcgagcacgacaaagcctatgaccggcagctcgacagcggagacaacccgtacctcaagtacaaccacgccgacgcggagtttcaggagcgccttaaagaagatacgtcttttgggggcaacctcggacgagcagtcttccaggcgaaaaagagggttcttgaacctctgggcctggttgaggaacctgttaagacggctccgggaaaaaagaggccggtagagcactctcctgtggagccagactcctcctcgggaaccggaaaggcgggccagcagcctgcaagaaaaagattgaattttggtcagactggagacgcaaactcagtacctgacccccagcctctcggacagccaccagcagccccctctggtctgggaactaatacgatggctacaggcagtggcgcaccaatggcagacaataacgagggcgccgacggagtgggtaattcctcgggaaattggcattgcgattccacatggatgggcgacagagtcatcaccaccagcacccgaacctgggccctgcccacctacaacaaccacctctacaaacaaatttccagccaatcaggagcctcgaacgacaatcactactttggctacagcaccccttgggggtattttgacttcaacagattccactgccacttttcaccacgtgactggcaaagactcatcaacaacaactggggattccgacccaagagactcaagttcaagctctttaacattcaagtcaaagaggtcacgcagaatgacggtacgacgacgattgccaataaccttaccagcacggttcaggtgtttactgactcggagtaccagctcccgtacgtcctcggctcggcgcatcaaggatgcctcccgccgttcccagcagacgtcttcatggtgccacagtatggatacctcaccctgaacaacgggagtcgggcagtaggacgctcttcattttactgcctggagtactttccttctcagatgctgcgtaccggtaacaactttaccttcagctacacttttgaggacgttcctttccacagcagctacgctcacagccagagtctggaccgtctcatgaatcctctcatcgaccagtacctgtattacttgagcagaacagacactccaagtggaaccaccacgcagtcaaggcttcagttttctcaggccggagcgagtgacattcgggaccagtctaggaactggcttcctggaccctgttaccgccagcagcgagtatcaaagacatctgcggataacaacaacagtgaatactcgtggactggagctaccaagtaccacctcaatggcagagactctctggtgaatccgggcccggccatggcaagccacaaggacgatgaagaaaagttttttcctcagagcggggttctcatctttgggaagcaaggctcagagaaaacaagtgtggacattgaaaaggtcatgattacagacgaagaggaaatcaggacgaccaatcccgtggctacggagcagtatggttctgtatctaccaacctccagagaggcaacagacaagcagctaccgcagatgtcaacacacaaggcgttcttccaggcatggtctggcaggacagagatgtgtaccttcaggggcccatctgggcaaagattccacacacggacggacattttcacccctctcccctcatgggtggattcggacttaaacaccctcctccacagattctcatcaagaacaccccggtacctgcgaatccttcgaccaccttcagtgcggcaaagtttgcttccttcatcacacagtactccacgggacaggtcagcgtggagatcgagtgggagctgcagaaggaaaacagcaaacgctggaatcccgaagttcagtacacttccaactacaacaagtctgttaatgtggactttactgtggacactaatggcgtgtatacagagcctcgccccattggcaccagatacctgactcgtaatctgtaa

SEQ ID NO: 587 - protein, 735 aa, Artificial Sequence
  Description of Artificial Sequence: Synthetic polypeptide
MAADGYLPDWLEDTLSEGIRQWWKLKPGPPPPKPAERHKDDSRGLVLPGYKYLGPFNGLDKGEPVNEADAAALEHDKAYDRQLDSGDNPYLKYNHADAEFQERLKEDTSFGGNLGRAVFQAKKRVLEPLGLVEEPVKTAPGKKRPVEHSPVEPDSSSGTGKAGQQPARKRLNFGQTGDANSVPDPQPLGQPPAAPSGLGTNTMATGSGAPMADNNEGADGVGNSSGNWHCDSTWMGDRVITTSTRTWALPTYNNHLYKQISSQSGASNDNHYFGYSTPWGYFDFNRFHCHFSPRDWQRLINNNWGFRPKRLKFKLFNIQVKEVTQNDGTTTIANNLTSTVQVFTDSEYQLPYVLGSAHQGCLPPFPADVFMVPQYGYLTLNNGSRAVGRSSFYCLEYFPSQMLRTGNNFTFSYTFEDVPFHSSYAHSQSLDRLMNPLIDQYLYYLSRTDTPSGTTTQSRLQFSQAGASDIRDQSRNWLPGPCYRQQRVSKTSADNNNSEYSWTGATKYHLNGRDSLVNPGPAMASHKDDEEKFFPQSGVLIFGKQGSEKTSVDIEKVMITDEEEIRTTNPVATEQYGSVSTNLQRGNRQAATADVNTQGVLPGMVWQDRDVYLQGPIWAKIPHTDGHFHPSPLMGGFGLKHPPPQILIKNTPVPANPSTTFSAAKFASFITQYSTGQVSVEIEWELQKENSKRWNPEVQYTSNYNKSVNVDFTVDTNGVYTEPRPIGTRYLTRNL

SEQ ID NO: 588 - DNA, 2211 bp, Artificial Sequence
  Description of Artificial Sequence: Synthetic polynucleotide
atggctgccgatggttatcttccagattggctcgaggacactctctctgaaggaataagacagtggtggaagctcaaacctggcccaccaccaccaaagcccgcagagcggcataaggacgacagcaggggtcttgtgcttcctgggtacaagtacctcggacccttcaacggactcgacaagggagagccggtcaacgaggcagacgccgcggccctcgagcacgacaaggcctacgaccagcagctcaaagcgggtgacaatccgtacctgcggtataaccacgccgacgccgagtttcaggagcgtctgcaagaagatacgtcttttgggggcaacctcgggcgagcagtcttccaggccaagaagcgggttctcgaacctctcggtctggttgaggaaggcgctaagacggctcctggaaagaaacgtccggtagagcagtcgccacaagagccagactcctcctcgggcatcggcaagacaggccagcagcccgctaaaaagagactcaattttggtcagactggcgactcagagtcagtccccgacccacaacctctcggagaacctccagcaacccccgctgctgtgggacctactacaatggcttcaggcggtggcgcaccaatggcagacaataacgaaggcgccgacggagtgggtaatgcctcaggaaattggcattgcgattccacatggctgggcgacagagtcatcaccaccagcacccgaacatgggccttgcccacctataacaaccacctctacaagcaaatctccagtgcttcgacgggggccagcaacgacaaccactacttcggctacagcaccccctgggggtattttgactttaacagattccactgccacttttcaccacgtgactggcagcgactcatcaacaataactggggattccggcccaagagactcagcttcaagctcttcaacatccaggtcaaggaggtcacgacgaatgatggcgtcacaaccatcgctaataaccttaccagcacggttcaagtcttctcggactcggagtaccagcttccgtacgtcctcggctctgcgcaccagggctgcctccctccgttcccggcggacgtgttcatgattccgcaatacggctacctgacgctcaacaatggcagccaagccgtgggacgttcatccttttactgcctggaatatttcccttctcagatgctgagaacgggcaacaactttaccttcagctacacctttgaggaagtgcctttccacagcagctacgcgcacagccagagcctggaccggctgatgaatcctctcatcgatcaatacctgtattacctgaacagaactcaaaatcagtccggaagtgcccaaaacaaggacttgctgtttagccgtgggtctccagctggcatgtctgttcagcccaaaaactggctacctggaccctgttatcggcagcagcgcgtttctaaaacaaaaacagacaacaacaacagcaattttacctggactggtgcttcaaaatataacctcaatgggcgtgaatccatcatcaaccctggcactgctatggcctcacacaaagacgacgaagacaagttctttcccatgagcggtgtcatgatttttggaaaagagagcgccggagcttcaaacactgcattggacaatgtcatgattacggacgaagaggaaattaaagccactaaccctgtggccaccgaaagatttgggaccgtggcagtcaatttccagagcagcagcacagaccctgcgaccggagatgtgcatgctatgggagcattacctggcatggtgtggcaagatagagacgtgtacctgcagggtcccatttgggccaaaattcctcacacagatggacactttcacccgtctcctcttatgggcggctttggactcaagaacccgcctcctcagatcctcatcaaaaacacgcctgttcctgcgaatcctccggcggagttttcagctacaaagtttgcttcattcatcactcaatactccacaggacaagtgagcgtggaaattgaatgggagctgcagaaagaaaacagcaaacgctggaatcccgaagtgcagtatacatctaactatgcaaaatctgccaacgttgatttcactgtggacaacaatggactttatactgagcctcgccccattggcacccgttacctcacccgtcccctgtaa

SEQ ID NO: 589 - protein, 736 aa, Artificial Sequence
  Description of Artificial Sequence: Synthetic polypeptide
MAADGYLPDWLEDTLSEGIRQWWKLKPGPPPPKPAERHKDDSRGLVLPGYKYLGPFNGLDKGEPVNEADAAALEHDKAYDQQLKAGDNPYLRYNHADAEFQERLQEDTSFGGNLGRAVFQAKKRVLEPLGLVEEGAKTAPGKKRPVEQSPQEPDSSSGIGKTGQQPAKKRLNFGQTGDSESVPDPQPLGEPPATPAAVGPTTMASGGGAPMADNNEGADGVGNASGNWHCDSTWLGDRVITTSTRTWALPTYNNHLYKQISSASTGASNDNHYFGYSTPWGYFDFNRFHCHFSPRDWQRLINNNWGFRPKRLSFKLFNIQVKEVTTNDGVTTIANNLTSTVQVFSDSEYQLPYVLGSAHQGCLPPFPADVFMIPQYGYLTLNNGSQAVGRSSFYCLEYFPSQMLRTGNNFTFSYTFEEVPFHSSYAHSQSLDRLMNPLIDQYLYYLNRTQNQSGSAQNKDLLFSRGSPAGMSVQPKNWLPGPCYRQQRVSKTKTDNNNSNFTWTGASKYNLNGRESIINPGTAMASHKDDEDKFFPMSGVMIFGKESAGASNTALDNVMITDEEEIKATNPVATERFGTVAVNFQSSSTDPATGDVHAMGALPGMVWQDRDVYLQGPIWAKIPHTDGHFHPSPLMGGFGLKNPPPQILIKNTPVPANPPAEFSATKFASFITQYSTGQVSVEIEWELQKENSKRWNPEVQYTSNYAKSANVDFTVDNNGLYTEPRPIGTRYLTRPL

SEQ ID NO: 590 - protein, 735 aa, Artificial Sequence
  Description of Artificial Sequence: Synthetic polypeptide
MAADGYLPDWLEDTLSEGIRQWWKLKPGPPPPKPAERHKDDSRGLVLPGYKYLGPFNGLDKGEPVNEADAAALEHDKAYDRQLDSGDNPYLKYNHADAEFQERLKEDTSFGGNLGRAVFQAKKRVLEPLGLVEEPVKTAPGKKRPVEHSPVEPDSSSGTGKAGQQPARKRLNFGQTGDADSVPDPQPLGQPPAAPSGLGTNTMATGSGAPMADNNEGADGVGNSSGNWHCDSTWMGDRVITTSTRTWALPTYNNHLYKQISSQSGASNDNHYFGYSTPWGYFDFNRFHCHFSPRDWQRLINNNWGFRPKRLKFKLFNIQVKEVTQNDGTTTIANNLTSTVQVFTDSEYQLPYVLGSAHQGCLPPFPADVFMVPQYGYLTLNNGSQAVGRSSFYCLEYFPSQMLRTGNNFTFSYTFEDVPFHSSYAHSQSLDRLMNPLIDQYLYYLSRTDTPSGTTTQSRLQFSQAGASDIRNQSRNWLPGPCYRQQRVSKTSADNNNSEYSWTGATKYHLNGRDSLVNPGPAMASHKDDEEKFFPQSGVLIFGKQGSEKTSVDIEKVMITDEEEIRTTNPVATEQYGSVSTNLQRGNRQAATADVNTQGVLPGMVWQDRDVYLQGPIWAKIPHTDGHFHPSPLMGGFGLKHPPPQILIKNTPVPANPSTTFSAAKFASFITQYSTGQVSVEIEWELQKENSKRWNPEVQYTSNYNKSVNVDFTVDTNGVYSEPRPIGTRYLTRNQ

SEQ ID NO: 591 - DNA, 2208 bp, Artificial Sequence
  Description of Artificial Sequence: Synthetic polynucleotide
atggctgccgatggttatcttccagattggctcgaggacactctctctgaaggaataagacagtggtggaagctcaaacctggcccaccaccaccaaagcccgcagagcggcataaggacgacagcaggggtcttgtgcttcctgggtacaagtacctcggacccttcaacggactcgacaagggagagccggtcaacgaggcagacgccgcggccctcgagcacgacaaagcctatgaccggcagctcgacagcggagacaacccgtacctcaagtacaaccacgccgacgcggagtttcaggaacgccttaaagaagatacgtcttttgggggcaacctcggacgagcagtcttccaggcgaaaaagagggttcttgaacctctgggcctggttgaggaacctgttaagacggctccgggaaaaaagaggccggtagagcactctcctgtggagccagactcctcctcgggaaccggaaaggcgggccagcagcctgcaagaaaaagattgaattttggtcagactggagacgcagactcagtacctgacccccagcctctcggacagccaccagcagccccctctggtctgggaactaatacgatggctacaggcagtggcgcaccaatggcagacaataacgagggcgccgacggagtgggtaattcctcgggaaattggcattgcgattccacatggatgggcgacagagtcatcaccaccagcacccgaacctgggccctgcccacctacaacaaccacctctacaaacaaatttccagccaatcaggagcctcgaacgacaatcactactttggctacagcaccccttgggggtattttgacttcaacagattccactgccacttttcaccacgtgactggcaaagactcatcaacaacaactggggattccgacccaagagactcaagttcaagctctttaacattcaagtcaaagaggtcacgcagaatgacggtacgacgacgattgccaataaccttaccagcacggttcaggtgtttactgactcggagtaccagctcccgtacgtcctcggctcggcgcatcaaggatgcctcccgccgttcccagcagacgtcttcatggtgccacagtatggatacctcaccctgaacaacgggagtcaggcagtaggacgctcttcattttactgcctggagtactttccttctcagatgctgcgtaccggtaacaactttaccttcagctacacttttgaggacgttcctttccacagcagctacgctcacagccagagtctggaccgtctcatgaatcctctcatcgaccagtacctgtattacttgagcagaacagacactccaagtggaaccaccacgcagtcaaggcttcagttttctcaggccggagcgagtgacattcggaaccagtctaggaactggcttcctggaccctgttaccgccagcagcgagtatcaaagacatctgcggataacaacaacagtgaatactcgtggactggagctaccaagtaccacctcaatggcagagactctctggtgaatccgggcccggccatggcaagccacaaggacgatgaagaaaagttttttcctcagagcggggttctcatctttgggaagcaaggctcagagaaaacaagtgtggacattgaaaaggtcatgattacagacgaagaggaaatcaggacaaccaatcccgtggctacggagcagtatggttctgtatctaccaacctccagagaggcaacagacaagcagctaccgcagatgtcaacacacaaggcgttcttccaggcatggtctggcaggacagagatgtgtaccttcaggggcccatctgggcaaagattccacacacggacggacattttcacccctctcccctcatgggtggattcggacttaaacaccctcctccacagattctcatcaagaacaccccggtacctgcgaatccttcgaccaccttcagtgcggcaaagtttgcttccttcatcacacagtactccacgggacaggtcagcgtggagatcgagtgggagctgcagaaggaaaacagcaaacgctggaatcccgaagttcagtacacttccaactacaacaagtctgttaatgtggactttactgtggacactaatggcgtgtattcagagcctcgccccattggcaccagatacctgactcgtaatcagtaa

SEQ ID NO: 592 - DNA, 2208 bp, Artificial Sequence
  Description of Artificial Sequence: Synthetic polynucleotide
atggctgccgatggttatcttccagattggctcgaggacactctctctgaaggaataagacagtggtggaagctcaaacctggcccaccaccaccaaagcccgcagagcggcataaggacgacagcaggggtcttgtgcttcctgggtacaagtacctcggacccttcaacggactcgacaagggagagccggtcaacgaggcagacgccgcggccctcgagcacgacaaagcctatgaccggcagctcgacagcggagacaacccgtacctcaagtacaaccacgccgacgcggagtttcaggagcgccttaaagaagatacgtcttttgggggcaacctcggacgagcagtcttccaggcgaaaaagagggttcttgaacctctgggcctggttgaggaacctgttaagacggctccgggaaaaaagaggccggtagagcactctcctgtggagccagactcctcctcgggaaccggaaaggcgggccagcagcctgcaagaaaaagattgaattttggtcagactggagacgcagactcagtacctgatccccagcctctcggacagccaccagcagccccctctggtctgggaactaatacgatggctacaggcagtggcgcaccaatggcagacaataacgagggcgccgacggagtgggtaattcctcgggaaattggcattgcgattccacatggatgggcgacagagtcatcaccaccagcacccgaacctgggccctgcccacctacaacaaccacctctacaaacaaatttccagccaatcaggagcctcgaacgacaatcactactttggctacagcaccccttgggggtattttgacttcaacagattccactgccacttttcaccacgtgactggcaaagactcatcaacaacaactggggattccgacccaagagactcaagttcaagctctttaacattcaagtcaaagaggtcacgcagaatgacggtacgacgacgattgccaataaccttaccagcacggttcaggtgtttactgactcggagtaccagctcccgtatgtcctcggctcggcgcatcaaggatgcctcccgccgttcccagcagacgtcttcatggtgccacagtatggatacctcaccctgaacaacgggagtcaggcagtaggacgctcttcattttactgcctggagtactttccttctcagatgctgcgtaccggtaacaactttaccttcagctacacttttgaggacgttcctttccacagcagctacgctcacagccagagtctggaccgtctcatgaatcctctcatcgaccagtacctgtattacttgagcagaacagacactccaagtggaaccaccacgcagtcaaggcttcagttttctcaggccggagcgagtgacattcgggaccagtctaggaactggcttcctggaccctgttaccgccagcagcgagtatcaaagacatctgcggataacaacaacagtgaatactcgtggactggagctaccaagtaccacctcaatggcagagactctctggtgaatccgggcccggccatggcaagccacaaggacgatgaagaaaagttttttcctcagagcggggttctcatctttgggaagcaaggctcagagaaaacaagtgtggacattgaaaaggtcatgattacagacgaagaggaaatcaggacaaccaatcccgtggctacggagcagtatggttctgtatctaccaacctccagagaggcaacagacaagcagctaccgcagatgtcaacacacaaggcgttcttccaggcatggtctggcaggacagagatgtgtaccttcaggggcccatctgggcaaagattccacacacggacggacattttcacccctctcccctcatgggtggattcggacttaaacaccctcctccacagattctcatcaagaacaccccggtacctgcgaatccttcgaccaccttcagtgcggcaaagtttgcttccttcatcacacagtactccacgggacaggtcagcgtggagatcgagtgggagctgcagaaggaaaacagcaaacgctggaatcccgaagttcagtacacttccaactacaacaagtctgttaatgtggactttactgtggacactaatggcgtgtattcagagcctcgccccattggcaccagatacctgactcgtaatctgtaa

SEQ ID NO: 593 - protein, 735 aa, Artificial Sequence
  Description of Artificial Sequence: Synthetic polypeptide
MAADGYLPDWLEDTLSEGIRQWWKLKPGPPPPKPAERHKDDSRGLVLPGYKYLGPFNGLDKGEPVNEADAAALEHDKAYDRQLDSGDNPYLKYNHADAEFQERLKEDTSFGGNLGRAVFQAKKRVLEPLGLVEEPVKTAPGKKRPVEHSPVEPDSSSGTGKAGQQPARKRLNFGQTGDADSVPDPQPLGQPPAAPSGLGTNTMATGSGAPMADNNEGADGVGNSSGNWHCDSTWMGDRVITTSTRTWALPTYNNHLYKQISSQSGASNDNHYFGYSTPWGYFDFNRFHCHFSPRDWQRLINNNWGFRPKRLKFKLFNIQVKEVTQNDGTTTIANNLTSTVQVFTDSEYQLPYVLGSAHQGCLPPFPADVFMVPQYGYLTLNNGSQAVGRSSFYCLEYFPSQMLRTGNNFTFSYTFEDVPFHSSYAHSQSLDRLMNPLIDQYLYYLSRTDTPSGTTTQSRLQFSQAGASDIRDQSRNWLPGPCYRQQRVSKTSADNNNSEYSWTGATKYHLNGRDSLVNPGPAMASHKDDEEKFFPQSGVLIFGKQGSEKTSVDIEKVMITDEEEIRTTNPVATEQYGSVSTNLQRGNRQAATADVNTQGVLPGMVWQDRDVYLQGPIWAKIPHTDGHFHPSPLMGGFGLKHPPPQILIKNTPVPANPSTTFSAAKFASFITQYSTGQVSVEIEWELQKENSKRWNPEVQYTSNYNKSVNVDFTVDTNGVYSEPRPIGTRYLTRNL

SEQ ID NO: 594 - DNA, 2212 bp, Artificial Sequence
  Description of Artificial Sequence: Synthetic polynucleotide
  misc_feature (1283)..(1283): n is a, c, g, or t
atggctgctgacggttatcttccagattggctcgaggacaacctttctgaaggcattcgtgagtggtgggctctgaaacctggagtccctcaacccaaagcgaaccaacaacaccaggacaaccgtcggggtcttgtgcttccgggttacaaatacctcggaccgggtaacggactcgacaaaggagagccggtcaacgaggcggacgcggcagccctcgaacacgacaaagcttacgaccagcagctcaaggccggtgacaacccgtacctcaagtacaaccacgccgacgccgagtttcaggagcgtcttcaagaagatacgtcttttgggggcaaccttggcagagcagtcttccaggccaaaaagaggatccttgagcctcttggtctggttgagggagcagctaaaacggctcctggaaagaagaggcctgtagatcagtctcctcaggaaccggactcatcatctggtgttggcaaatcgggcaaacagcctgccagaaaaagactaaatttcggtcagactggcgactcagagtcagtcccagaccctcaacctctcggagaaccaccagcagcccccacaagtttgggatctaatacaatggcttcaggcggtggcgcaccaatggcagacaataacgagggtgccgatggagtgggtaattcctcaggaaattggcattgcgattcccaatggctgggcgacagagtcatcaccaccagcaccagaacctgggccctgcccacttacaacagccatctctacaagcaaatctccagccaatcaggagcttcaaacgacaaccactactttggctacagcaccccttgggggtattttgactttaacagattccactgccacttctcaccacgtgactggcagcgactcattaacaacaactggggattccggcccaagaaactcagcttcaagctcttcaacatccaagttaaagaggtcacgcagaacgatggcacgacgactattgccaataaccttaccagcacggtccaagtgtttacggactcggagtatcagctcccgtacgtgctcgggtcggcgcaccaaggctgtctcccgccgtttccagcggacgccttcatggtccctcagtatggatacctcaccctgaacaacggaagtcaagcggtgggacgctcatccttttactgcctggagtacttcccttcgcagatgctaaggactggaaataacttccaattcagctataccttcgaggatgtaccttttcacggcagctacgctcacagccngagtttggatcgcttgatgaatcctcttattgatcagtatctgtactacctgaacagaacgcaaggaacaacctctggaacaaccaaccaatcacggctgctttttagccaggctgggcctcagtctatgtctttgcaggccagaaattggctacctgggccctgctaccggcaacagagacttttcaaagactgctaacgacaacaacaacagtaactttccttggacagcggccagcaaatatcatctcaatggccgcgactcgctggtgaatccaggaccagctatggccagtcacaaggacgatgaagaaaaatttttccctatgcacggcaatctaatatttggcaaagaagggacaacggcaagtaacgcagaattagataatgtaatgattacggatgaagaagagattcgtaccaccaatcctgtggcaacagagcagtatggaactgtggcaaataacttgcagagctcaaatacagctcccacgactagaactgtcaatgatcagggggccttacctggcatggtgtggcaagatcgtgacgtgtaccttcaaggacctatctgggcaaagattcctcacacggatggacactttcatccttctcctctgatgggaggctttggactgaaacatccgcctcctcaaatcatgatcaaaaatactccggtaccggcaaatcctccgacgactttcagcccggccaagtttgcttcatttatcactcagtactccactggacaggtcagcgtggaaattgagtgggagctacagaaagaaaacagcaaacgttggaatccagagattcagtacacttccaactacaacaagtctgttaatgtggactttactgtagacactaatggtgtttatagtgaacctcgccctattggaacccggtatctcacacgaaactcgtaa

SEQ ID NO: 595 - protein, 736 aa, Artificial Sequence
  Description of Artificial Sequence: Synthetic polypeptide
MAADGYLPDWLEDNLSEGIREWWALKPGVPQPKANQQHQDNRRGLVLPGYKYLGPGNGLDKGEPVNEADAAALEHDKAYDQQLKAGDNPYLKYNHADAEFQERLQEDTSFGGNLGRAVFQAKKRILEPLGLVEGAAKTAPGKKRPVDQSPQEPDSSSGVGKSGKQPARKRLNFGQTGDSESVPDPQPLGEPPAAPTSLGSNTMASGGGAPMADNNEGADGVGNSSGNWHCDSQWLGDRVITTSTRTWALPTYNSHLYKQISSQSGASNDNHYFGYSTPWGYFDFNRFHCHFSPRDWQRLINNNWGFRPKKLSFKLFNIQVKEVTQNDGTTTIANNLTSTVQVFTDSEYQLPYVLGSAHQGCLPPFPADAFMVPQYGYLTLNNGSQAVGRSSFYCLEYFPSQMLRTGNNFQFSYTFEDVPFHGSYAHSQSLDRLMNPLIDQYLYYLNRTQGTTSGTTNQSRLLFSQAGPQSMSLQARNWLPGPCYRQQRLSKTANDNNNSNFPWTAASKYHLNGRDSLVNPGPAMASHKDDEEKFFPMHGNLIFGKEGTTASNAELDNVMITDEEEIRTTNPVATEQYGTVANNLQSSNTAPTTRTVNDQGALPGMVWQDRDVYLQGPIWAKIPHTDGHFHPSPLMGGFGLKHPPPQIMIKNTPVPANPPTTFSPAKFASFITQYSTGQVSVEIEWELQKENSKRWNPEIQYTSNYNKSVNVDFTVDTNGVYSEPRPIGTRYLTRNS

SEQ ID NO: 596 - DNA, 2211 bp, Artificial Sequence
  Description of Artificial Sequence: Synthetic polynucleotide
atggctgctgacggttatcttccagattggctcgaggacaacctttctgaaggcattcgtgagtggtgggctctgaaacctggagtccctcaacccaaagcgaaccaacaacaccaggacaaccgtcggggtcttgtgcttccgggttacaaatacctcggacccggtaacggactcgacaaaggagagccggtcaacgaggcggacgcggcagccctcgaacacgacaaagcttacgaccagcagctcaaggccggtgacaacccgtacctcaagtacaaccacgccgacgccgagtttcaggagcgtcttcaagaagatacgtcttttgggggcaaccttggcagagcagtcttccaggccaaaaagaggatccttgagcctcttggtctggttgagggagcagctaaaacggctcctggaaagaagaggcctgtagatcagtctcctcaggaaccggactcatcatctggtgttggcaaatcgggcaaacagcctgccagaaaaagactaaatttcggtcagactggcgactcagagtcagtcccagaccctcaacctctcggagaaccaccagcagcccccacaagtttgggatctaatacaatggcttcaggcggtggcgcaccaatggcagacaataacgagggtgccgatggagtgggtaattcctcaggaaattggcattgcgattcccaatggctgggcgacagagtcatcaccaccagcaccagaacctgggccctgcccacttacaacagccatctctacaagcaaatctccagccaatcaggagcttcaaacgacaaccactactttggctacagcaccccttggggtattttgactttaacagattccactgccacttctcaccacgtgactggcagcgactcattaacaacaactggggattccggcccaagaaactcagcttcaagctcttcaacatccaagttaaagaggtcacgcagaacgatggcacgacgactattgccaataaccttaccagcacggttcaagtgtttacggactcggagtatcagctcccgtacgtgctcgggtcggcgcaccaaggctgtctcccgccgtttccagcggacgccttcatggtccctcagtatggatacctcaccctgaacaacggaagtcaagcggtgggacgctcatccttttactgcctggagtacttcccttcgcagatgctaaggactggaaataacttccaattcagctataccctcgaggatgtaccttttcacagcagctacgctcacagccagagtttggatcgcttgatgaatcctcttattgatcagtatctgtactacctgaacagaacgcaaggaacaacctctggaacaaccaaccaatcacggctgctttttagccaggctgggcctcagtctatgtctttgcaggccagaaattggctacctgggccctgctaccggcaacagagactttcaaagactgctaacgacaacaacaacagtaactttccttggacagcggccagcaaatatcatctcaatggccgcgactcgctggtgaatccaggaccagctatggccagtcacaaaggacgatgaagaaaaatttttccctatgcacggcaatctaatatttggcaaagaagggacaacggcaagtaacgcagaattagatagtgtaatgattacggatgaagaagagattcgtaccaccaatcctgtggcaacagagcagtatggaactgtggcaaataacttgcagagctcaaatacagctcccacgactagaactgtcaatgatcagggggccttacctggcatggtgtggcaagatcgtgacgtgtaccttcaaggacctatctgggcaaagattcctcacacggatggacactttcatccttctcctctgatgggaggctttggactgaaacatccgcctcctcaaatcatgatcaaaaatactccggtaccggcaaatcctccgacgactttcagcccggccaagtttgcttcatttatcactcagtactccactggacaggtcagcgtggaaattgagtgggagctacagaaagaaaacagcaaacgttggaatccagagattcagtacacttccaactacaacaagtctgttaatgtggactttactgtagacactaatggtgtttatagtgaacctcgccctattggaacccggtatctcacacgaaacttgtaa

SEQ ID NO: 597 - protein, 668 aa, Artificial Sequence
  Description of Artificial Sequence: Synthetic polypeptide
MAADGYLPDWLEDNLSEGIREWWALKPGVPQPKANQQHQDNRRGLVLPGYKYLGPGNGLDKGEPVNEADAAALEHDKAYDQQLKAGDNPYLKYNHADAEFQERLQEDTSFGGNLGRAVFQAKKRILEPLGLVEGAAKTAPGKKRPVDQSPQEPDSSSGVGKSGKQPARKRLNFGQTGDSESVPDPQPLGEPPAAPTSLGSNTMASGGGAPMADNNEGADGVGNSSGNWHCDSQWLGDRVITTSTRTWALPTYNSHLYKQISSQSGASNDNHYFGYSTPWGILTLTDSTATSHHVTGSDSLTTTGDSGPRNSASSSSTSKLKRSRRTMARRLLPITLPARFKCLRTRSISSRTCSGRRTKAVSRRFQRTPSWSLSMDTSPTTEVKRWDAHPFTAWSTSLRRCGLEITSNSAIPSRMYLFTAATLTARVWIAILLLISICTTTERKEQPLEQPTNHGCFLARLGLSLCLCRPEIGYLGPATGNRDFQRLLTTTTTVTFLGQRPANIISMAATRWIQDQLWPVTRTMKKNFSLCTAIRGPYLAWCGKIVTCTFKDLSGQRFLTRMDTFILLLWEALDNIRLLKSSKILRYRQILRRLSARPSLLHLSLSTPLDRSAWKLSGSYRKKTANVGIQRFSTLPTTTSLLMWTLLTLMVFIVNLALLEPGISHETC

SEQ ID NO: 598 - DNA, 2212 bp, Artificial Sequence
  Description of Artificial Sequence: Synthetic polynucleotide
atggctgctgacggttatcttccagattggctcgaggacaacctttctgaaggcattcgtgagtggtgggctctgaaacctggagtccctcaacccaaagcgaaccaacaacaccaggacaaccgtcggggtcttgtgcttccgggttacaaatacctcggacccggtaacggactcgacaaaggagagccggtcaacgaggcggacgcggcagccctcgaacacgacaaagcttacgaccagcagctcaaggccggtgacaacccgtacctcaagtacaaccacgccgacgccgagtttcaggagcgtcttcaagaagatacgtcttttgggggcaaccttggcagagcagtcttccaggccaaaaagaggatccttgagcctcttggtctggttgagggagcagctaaaacggctcctggaaagaagaggcctgtagatcagtctcctcaggaaccggactcatcatctggtgttggcaaatcgggcaaacagcttgccagaaaaagactaaatttcggtcagactggcgactcagagtcagtcccagaccctcaacctctcggagaaccaccagcagcccccacaagtttgggatctaatacaatggcttcaggcggtggcgcaccaatggcagacaataacgagggtgccgatggagtgggtaattcctcaggaaattggcattgcgattcccaatggctgggcgacagagtcatcaccaccagcaccagaacctgggccctgcccacttacaacagccatctctacaagcaaatctccggccaatcaggagcttcaaacgacaaccactactttggctacagcaccccctgggggtattttgactttaacagattccactgccacttctcaccacgtgactggcagcgactcattaacaacaactggggattccggcccaagaaactcagcttcaagctcttcaacatccaagttaaagaggtcacgcagaacgatggcacgacgactattgccaataaccttaccagcacggttcaagtgtttacggactcggagtatcagctcccgtacgtgctcgggtcggcgcaccaaggctgtctcccgccgtttccagcggacgtcttcatggtccctcagtatggatacctcaccctgaacaacggaagtcaagcggtgggacgctcatccttttactgcctggagtacttcccttcgcagatgctaaggactggaaataacttccaattcagctataccttcgaggatgtaccttttcacagcagctacgctcacagccagagtttggatcgcttgatgaatcctcttattgatcagtatctgtactacctgaacagaacgcaaggaacaacctctggaacaaccaaccaatcacggctgctttttagccaggctgggcctcagtctatgtctttgcaggccagaaattggctacctgggccctgctaccggcaacagagactttcaaagactgctaacgacaacaacaacagtaactttccttggacagcggccagcaaatatcatctcaatggccgcgactcgctggtgaatcccaggaccagctatggccagtcacaaggacgatgaagaaaaatttttccctatgcacggcaatctaatatttggcaaagaagggacaacggcaagtaacgcagaattagataatgtaatgattacggatgaagaagagattcgtaccaccaatcctgtggcaacagagcagtatggaactgtggcaaataacttgcagagctcaaatacagctcccacgactagaactgtcaatgatcagggggccttacctggcatggtgtggcaagatcgtgacgtgtaccttcaaggacctatctgggcaaagattcctcacacggatggacactttcatccttctcctctgatgggaggctttggactgaaacatccgcctcctcaaatcatgatcaaaaatactccggtaccggcaaatcctccgacgactttcagcccggccaagtttgcttcatttatcactcagtactccactggacaggtcagcgtggaaattgagtgggagctacagaaagaaaacagcaaacgttggaatccagagattcagtacacttccaactacaacaagtctgttaatgtggactttactgtagacactaatggtgtttatagtgaacctcgccctattggaacccggtatctcacacgaaacttgtaa

SEQ ID NO: 599 - protein, 736 aa, Artificial Sequence
  Description of Artificial Sequence: Synthetic polypeptide
MAADGYLPDWLEDNLSEGIREWWALKPGVPQPKANQQHQDNRRGLVLPGYKYLGPGNGLDKGEPVNEADAAALEHDKAYDQQLKAGDNPYLKYNHADAEFQERLQEDTSFGGNLGRAVFQAKKRILEPLGLVEGAAKTAPGKKRPVDQSPQEPDSSSGVGKSGKQLARKRLNFGQTGDSESVPDPQPLGEPPAAPTSLGSNTMASGGGAPMADNNEGADGVGNSSGNWHCDSQWLGDRVITTSTRTWALPTYNSHLYKQISGQSGASNDNHYFGYSTPWGYFDFNRFHCHFSPRDWQRLINNNWGFRPKKLSFKLFNIQVKEVTQNDGTTTIANNLTSTVQVFTDSEYQLPYVLGSAHQGCLPPFPADVFMVPQYGYLTLNNGSQAVGRSSFYCLEYFPSQMLRTGNNFQFSYTFEDVPFHSSYAHSQSLDRLMNPLIDQYLYYLNRTQGTTSGTTNQSRLLFSQAGPQSMSLQARNWLPGPCYRQQRLSKTANDNNNSNFPWTAASKYHLNGRDSLVNPGPAMASHKDDEEKFFPMHGNLIFGKEGTTASNAELDNVMITDEEEIRTTNPVATEQYGTVANNLQSSNTAPTTRTVNDQGALPGMVWQDRDVYLQGPIWAKIPHTDGHFHPSPLMGGFGLKHPPPQIMIKNTPVPANPPTTFSPAKFASFITQYSTGQVSVEIEWELQKENSKRWNPEIQYTSNYNKSVNVDFTVDTNGVYSEPRPIGTRYLTRNL

SEQ ID NO: 600 - DNA, 2212 bp, Artificial Sequence
  Description of Artificial Sequence: Synthetic polynucleotide
atggctgctgacggttatcttccagattggctcgaggacaacctttctgaaggcattcgtgagtggtgggctctgaaacctggagtccctcaacccaaagcgaaccaacaacaccaggacgaccgtcggggtcttgtgcttccgggttacaaatacctcggacccggtaacggactcgacaaaggagagccggtcaacgaggcggacgcggcagccctcgaacacgacaaagcttacgaccagcagctcaaggccggtgacaacccgtgcctcaagtacaaccacgccgacgccgagtttcaggagcgtcttcaagaagatacgtcttttgggggcaaccttggcagagcagtcttccaggccaaaaagaggatccttgagcctcttggtctggttgaggaagcagctaaaacggctcctggaaagaagaggcctgtagatcagtctcctcaggaaccggactcatcatctggtgttggcaaatcgggcaaacagcctgccagaaaaagactaaatttcggtcagactggcgactcagagtcagtcccagaccctcaacctctcggagaaccaccagcagcccccacaagtttgggatctaatacaatggcttcaggcggtagcgcaccaatggcagacaataacgagggtgccgatggagtgggtaattcctcaggaaattggcattgcgattcccaatggctgggcgacagagtcatcaccaccagcaccagaacctgggccctgcccacttacaacaaccatctctacaagcaaatctccagccaatcaggagcttcaaacgacaaccactactttggctacagcaccccttgggggtattttgactttaacagattccactgccacttctcaccacgtgactggcagcgactcattaacaacaactggggattccggcccaagaaactcagcttcaagctcttcaacatccaagttaaagaggtcacgcagaacgatggcacgacgactattgccaataaccttaccagcacggttcaagtgtttacggactcggagtatcagctcccgtacgtgctcgggtcggcgcaccaaggctgtctcccgccgtttccagcggacgtcttcatggtccctcagtatggatacctcaccctgaacaacggaagtcaagcggtgggacgctcatccttttactgcctggagtacttcccttcgcagatgctaaggactggaaataacttccaattcagctataccttcgaggatgtaccttttcacagcagctacgctcacagccagagtttggatcgcttgatggatcctcttattgatcagtatctgtactacctgaacagaacgcaaggaacaacctctggaacaaccaaccaatcacggctgctttttagccaggctgggcctcagtctatgtctttgcaggccagaaattggctacctgggccctgctaccggcaacagagactttcaaagactgctaacgacaacaacaacagtaactttccttggacagcggccagcaaatatcatctcaatggccgcgactcgctggtgaatccaggaccagctatggccagtcacaaaggacgatgaagaaaaatttttccctatgcacggcaatctaatatttggcaaagaagggacaacggcaagtaacgcagaattagataatgtaatgattacggatgaagaagagattcgtaccaccaatcctgtggcaacagagcagtatggaactgtggcaaataacttgcagagctcaaatacagctcccacgactagaactgtcaatgatcagggggccttacctggcatggtgtggcaagatcgtgacgtgtaccttcaaggacctatctgggcaaagattcctcacacggatggacactttcatccttctcctctgatgggaggctttggactgaaacatccgcctcctcaaatcatgatcaaaaatactccggtaccggcaaatcctccgacgactttcagcccggccaagtttgcttcatttatcactcagtactccactggacaggtcagcgtggaaattgagtgggagctacagaaagaaaacagcaaacgttggaatccagagattcagtacacttccaactacaacaagtctgttaatgtggactttactgtagacactaatggtgtttatagtgaacctcgccctattggaacccggtatctcacacgaaacctgtaa

SEQ ID NO: 601 - protein, 736 aa, Artificial Sequence
  Description of Artificial Sequence: Synthetic polypeptide
MAADGYLPDWLEDNLSEGIREWWALKPGVPQPKANQQHQDDRRGLVLPGYKYLGPGNGLDKGEPVNEADAAALEHDKAYDQQLKAGDNPCLKYNHADAEFQERLQEDTSFGGNLGRAVFQAKKRILEPLGLVEEAAKTAPGKKRPVDQSPQEPDSSSGVGKSGKQPARKRLNFGQTGDSESVPDPQPLGEPPAAPTSLGSNTMASGGSAPMADNNEGADGVGNSSGNWHCDSQWLGDRVITTSTRTWALPTYNNHLYKQISSQSGASNDNHYFGYSTPWGYFDFNRFHCHFSPRDWQRLINNNWGFRPKKLSFKLFNIQVKEVTQNDGTTTIANNLTSTVQVFTDSEYQLPYVLGSAHQGCLPPFPADVFMVPQYGYLTLNNGSQAVGRSSFYCLEYFPSQMLRTGNNFQFSYTFEDVPFHSSYAHSQSLDRLMDPLIDQYLYYLNRTQGTTSGTTNQSRLLFSQAGPQSMSLQARNWLPGPCYRQQRLSKTANDNNNSNFPWTAASKYHLNGRDSLVNPGPAMASHKDDEEKFFPMHGNLIFGKEGTTASNAELDNVMITDEEEIRTTNPVATEQYGTVANNLQSSNTAPTTRTVNDQGALPGMVWQDRDVYLQGPIWAKIPHTDGHFHPSPLMGGFGLKHPPPQIMIKNTPVPANPPTTFSPAKFASFITQYSTGQVSVEIEWELQKENSKRWNPEIQYTSNYNKSVNVDFTVDTNGVYSEPRPIGTRYLTRNL

SEQ ID NO: 602 - DNA, 2211 bp, Artificial Sequence
  Description of Artificial Sequence: Synthetic polynucleotide
atggctgctgacggttatcttccagattggctcgaggacaacctttctgaaggcattcgtgagtggtgggctctgaaacctggagtccctcaacccaaagcgaaccaacaacaccaggacgaccgtcggggtcttgtgcttccgggttacaaatacctcggacccggtaacggactcgacaaaggagagccggtcaacgaggcggacgcggcagccctcgaacacgacaaagcttacgaccagcagctcaaggccggtgacaacccgtacctcaagtacaaccacgccgacgccgagtttcaggagcgtcttcaagaagatacgtcttttgggggcaaccttggcagagcagtcttccaggccaaaaagaggatccttgagcctcttggtctggttgaggaagcagctaaaacggctcctggaaagaagaggcctgtagatcagtctcctcaggaaccggactcatcatctggtgttggcaaatcgggcaaacagcctgccagaaaaagactaaatttcggtcagactggcgactcagagtcagtcccagaccctcaacctctcggagaaccaccagcagcccccacaagtttgggatctaatacaatggcttcaggcggtggcgcaccaatggcagacaataacgagggtgccgatggagtgggtaattcctcaggaaattggcattgcgattcccaatggctgggcaacagagtcatcaccaccagcaccagaacctgggccctgcccacttacaacaaccatctctacaagcaaatctccagccaatcaggagcttcaaacgacaaccactactttggctacagcaccccttgggggtattttgactttaacagattccactgccacttctcaccacgtgactggcagcgactcattaacaacaactggggattccggcccaagaaactcagcttcaagctcttcaacatccaagttaaagaggtcacgcagaacgatggcacgacgactattgccaataaccttaccagcacggttcaagtgtttacggactcggagtatcagctcccgtacgtgctcgggtcggcgcaccaaggctgtctcccgccgtttccagcggacgtcttcatggtccctcagtatggatacctcaccctgaacaacggaagtcaagcggtgggacgctcatccttttactgcctggagtacttcccttcgcagatgctaaggactggaaataacttccaattcagctataccttcgaggatgtaccttttcacagcagctacgctcacagccagagtttggatcgcttgatgaatcctcttattgatcagtatctgtactacctgaacagaacgcaaggaacaacctctggaacaaccaaccaatcacggctgctttttagccaggctgggcctcagtctatgtctttgcaggccagaaattggctacctgggccctgctaccggcaacagagactttcaaagactgctaacgacaacaacaacagtaactttccttggacagcggccagcaaatatcatctcaatggccgcgactcgctggtgaatccaggaccagctatggccagtcacaaggacgatgaagaaaaatttttccctatgcacggcaatctaatatttggcaaagaagggacaacggcaagtaacgcagaattagataatgtaatgattacggatgaagaagagattcgtaccaccaatcctgtggcaacagagcagtatggaactgtggcaaataacttgcagagctcaaatacagctcccacgactagaactgtcaatgatcagggggccttacctggcatggtgtggcaagatcgtgacgtgtaccttcaaggacctatctgggcaaagattcctcacacggatggacactttcatccttctcctctgatgggaggctttggactgaaacatccgcctcctcaaatcatgatcaaaaatactccggtaccggcaaatcctccgacgactttcagcccggccaagtttgcttcatttatcactcagtactccactggacaggtcagcgtggaaattgagtgggagctacagaaagaaaacagcaaacgttggaatccagagattcagtacacttccaactacaacaagtctgttaatgtggactttactgtagacactaatggtgtttatagtgaacctcgccctattggaacccggtatctcacacgaaacttgtaa

SEQ ID NO: 603 - protein, 736 aa, Artificial Sequence
  Description of Artificial Sequence: Synthetic polypeptide
MAADGYLPDWLEDNLSEGIREWWALKPGVPQPKANQQHQDDRRGLVLPGYKYLGPGNGLDKGEPVNEADAAALEHDKAYDQQLKAGDNPYLKYNHADAEFQERLQEDTSFGGNLGRAVFQAKKRILEPLGLVEEAAKTAPGKKRPVDQSPQEPDSSSGVGKSGKQPARKRLNFGQTGDSESVPDPQPLGEPPAAPTSLGSNTMASGGGAPMADNNEGADGVGNSSGNWHCDSQWLGNRVITTSTRTWALPTYNNHLYKQISSQSGASNDNHYFGYSTPWGYFDFNRFHCHFSPRDWQRLINNNWGFRPKKLSFKLFNIQVKEVTQNDGTTTIANNLTSTVQVFTDSEYQLPYVLGSAHQGCLPPFPADVFMVPQYGYLTLNNGSQAVGRSSFYCLEYFPSQMLRTGNNFQFSYTFEDVPFHSSYAHSQSLDRLMNPLIDQYLYYLNRTQGTTSGTTNQSRLLFSQAGPQSMSLQARNWLPGPCYRQQRLSKTANDNNNSNFPWTAASKYHLNGRDSLVNPGPAMASHKDDEEKFFPMHGNLIFGKEGTTASNAELDNVMITDEEEIRTTNPVATEQYGTVANNLQSSNTAPTTRTVNDQGALPGMVWQDRDVYLQGPIWAKIPHTDGHFHPSPLMGGFGLKHPPPQIMIKNTPVPANPPTTFSPAKFASFITQYSTGQVSVEIEWELQKENSKRWNPEIQYTSNYNKSVNVDFTVDTNGVYSEPRPIGTRYLTRNL

SEQ ID NO: 604 - DNA, 2211 bp, Artificial Sequence
  Description of Artificial Sequence: Synthetic polynucleotide
atggctgctgacggttatcttccagattggctcgaggacaacctttctgaaggcattcgtgagtggtgggctctgaaacctggagtccctcaacccaaagcgaaccaacaacaccaggacgaccgtcggggtcttgtgcttccgggttacaaatacctcggacccggtaacggactcgacaaaggagagccggtcaacgaggcggacgcggcagccctcgaacacgacaaagcttacgaccagcagctcaaggccggtgacaacccgtacctcaagtacaaccacgccgacgccgagtttcaggagcgtcttcaagaagatacgtcttttgggggcaaccttggcagagcagtcttccaggccaaaaagaggatccttgagcctcttggtctggttgaggaagcagctaaaacggctcctggaaagaagaggcctgtagatcagtctcctcaggaaccggactcatcatctggtgttggcaaatcgggcaaacagcctgccagaaaaagactaaatttcggtcagactggcgactcagagtcagtcccagaccctcaacctctcggagaaccaccagcagcccccacaagtttgggatctaatacaatggcttcaggcggtggcgcaccaatggcggacaataacgagggtgccgatggagtgggtaattcctcaggaaattggcattgcgattcccaatggctgggcgacagagtcatcaccaccagcaccagaacctgggccctgcccacttacaacaaccatctctacaagcaaatctccagccaatcaggagcttcaaacgacaaccactactttggctacagcaccccttgggggtattttgactttaacagattccactgccacttctcaccacgtgactggcagcgactcattaacaacaactggggattccggcccaagaaactcagcttcaagctcttcaacatccaagttaaagaggtcacgcagaacgatggcacgacgactattgccaataaccttaccagcacggttcaagtgtttacggactcggagtatcagctcccgtacgtgctcgggtcggcgcaccaaggctgtctcccgccgtttccagcggacgtcttcatggtccctcagtatggatacctcaccctgaacaacggaagtcaagcggtgggacgctcatccttttactgcctggagtacttcccttcgcagatgctaaggactggaaataacttccaattcagctataccttcgaggatgtaccttttcacagcagctacgctcacagccagagtttggatcgcttgatgaatcctcttattgatcagtatctgtactacctgaacagaacgcaaggaacaacctctggaacaaccaaccaatcacggctgctttttagccaggctgggcctcagtctatgtctttgcaggccagaaattggctacctgggccctgctaccggcaacagagactttcaaagactgctaacgacaacaacaacagtaactttccttggacagcggccagcaaatatcatctcaatggccgcgactcgctggtgaatccaggaccagctatggccagtcacaaggacgatgaagaaaaatttttccctatgcacggcaatctaatatttggcaaagaagggacaacggcaagtaacgcagaattagataatgtaatgattacggatgaagaagagattcgtaccaccaatcctgtggcaacagtgcagtatggaactgtggcaaataacttgcagagctcaaatacagctcccacgactagaactgtcaatgatcagggggccttacctggcatggtgtggcaagatcgtgacgtgtaccttcaaggacctatctgggcaaagattcctcacacggatggacactttcatccttctcctctgatgggaggctttggactgaaacatccgcctcctcaaatcatgatcaaaaatactccggtaccggcaaatcctccgacgactttcagcccggccaagtttgcttcatttatcactcagtactccactggacaggtcagcgtggaaattgagtgggagctacagaaagaaaacagcaaacgttggaatccagagattcagtacacttccaactacaacaagtctgttaatgtggactttactgtagacactaatggtgtttatagtgaacctcgccctattggaacccggtatctcacacgaaacttgtaa

SEQ ID NO: 605 - protein, 736 aa, Artificial Sequence
  Description of Artificial Sequence: Synthetic polypeptide
MAADGYLPDWLEDNLSEGIREWWALKPGVPQPKANQQHQDDRRGLVLPGYKYLGPGNGLDKGEPVNEADAAALEHDKAYDQQLKAGDNPYLKYNHADAEFQERLQEDTSFGGNLGRAVFQAKKRILEPLGLVEEAAKTAPGKKRPVDQSPQEPDSSSGVGKSGKQPARKRLNFGQTGDSESVPDPQPLGEPPAAPTSLGSNTMASGGGAPMADNNEGADGVGNSSGNWHCDSQWLGDRVITTSTRTWALPTYNNHLYKQISSQSGASNDNHYFGYSTPWGYFDFNRFHCHFSPRDWQRLINNNWGFRPKKLSFKLFNIQVKEVTQNDGTTTIANNLTSTVQVFTDSEYQLPYVLGSAHQGCLPPFPADVFMVPQYGYLTLNNGSQAVGRSSFYCLEYFPSQMLRTGNNFQFSYTFEDVPFHSSYAHSQSLDRLMNPLIDQYLYYLNRTQGTTSGTTNQSRLLFSQAGPQSMSLQARNWLPGPCYRQQRLSKTANDNNNSNFPWTAASKYHLNGRDSLVNPGPAMASHKDDEEKFFPMHGNLIFGKEGTTASNAELDNVMITDEEEIRTTNPVATVQYGTVANNLQSSNTAPTTRTVNDQGALPGMVWQDRDVYLQGPIWAKIPHTDGHFHPSPLMGGFGLKHPPPQIMIKNTPVPANPPTTFSPAKFASFITQYSTGQVSVEIEWELQKENSKRWNPEIQYTSNYNKSVNVDFTVDTNGVYSEPRPIGTRYLTRNL

SEQ ID NO: 606 - DNA, 2211 bp, Artificial Sequence
  Description of Artificial Sequence: Synthetic polynucleotide
atggctgctgacggttatcttccagattggctcgaggacaacctttctgaaggcattcgtgagtggtgggctctgaaacctggagtccctcaacccaaagcgaaccaacaacaccaggacaaccgtcggggtcttgtgcttccgggttacaaatacctcggacccggtaacggactcgacaaaggagagccggtcaacgaggcggacgcggcagccctcgaacacgacaaagcttacgaccagcagctcaaggccggtgacaacccgtacctcaagtacaaccacgccgacgccgagtttcaggagcgtcttcaagaagatacgtcttttgggggcaaccttggcagagcagtcttccaggccaaaaaggggatccttgagcctcttggtctggttgaggaagcagctaaaacggctcctggaaagaagaggcctgtagatcagtctcctcaggaaccggactcatcatctggtgttggcaaatcgggcaaacagcctgccagaaaaagactaaatttcggtcagactggcgactcagagtcagtcccagaccctcaacctctcggagaaccaccagcagcccccacaagtttgggatctaatacaatggcttcaggcggtggcgcaccaatggcagacaataacgagggtgccgatggagtgggtaattcctcaggaaattggcattgcgattcccaatggctgggcgacagagtcatcaccaccagcaccagaacctgggccctgcccacttacaacaaccatctctacaagcaaatctccagccaatcaggagcttcaaacgacaaccactactttggctacagcaccccttgggggtattttgactttaacagattccactgccacttctcaccacgtgactggcagcgactcattaacaacaactggggattccggcccaagaaactcagcttcaagctcttcaacatccaagttaaagaggtcacgcagaacgatggcacgacgactattgccaataaccttaccagcacggttcaagtgtttacggactcggagtatcagctcccgtacgtgttcgggtcggcgcaccaaggctgtctcccgccgtttccagcggacgtcttcatggtccctcagtatggatacctcaccctgaacaacggaagtcaagcggtgggacgctcatccttttactgcctggagtacttcccttcgcagatgctaaggactggaaataacttccaattcagctataccttcgaggatgtaccttttcacagcagctacgctcacagccagagttcggatcgcttgatgaatcctcttattgatcagtatctgtactacctgaacagaacgcaaggaacaacctctggaacaaccaaccaatcacggctgctttttagccaggctgggcctcagtctatgtctttgcaggccagaaattggctacctgggccctgctaccggcaacagagactttcaaagactgctaacgacaacaacaacagtaactttccttgaacagcggccagcaaatatcatctcaatggccgcgactcgctggtgaatccaggaccagctatggccagtcacaaggacgatgaagaaaaatttttccctatgcacggcaatctaatatttggcaaagaagggacaacggcaagtaacgcagaattagataatgtaatgattacggatgaagaagagattcgtaccaccaatcctgtggcaacagagcagtatggaactgtggcaaataacttgcagagctcaaatacagctcccacgactagaactgtcaatgatcagggggccttacctggcatggtgtggcaagatcgtgacgtgtaccttcaaggacctatctgggcaaagattcctcacacggatggacactttcatccttctcctctgatgggaggctttggactgaaacatccgcctcctcaaatcatgatcaaaaatactccggtaccggcaaatcctccgacgactttcagcccggccaagtttgcttcatttatcactcagtactccactggacaggtcagcgtggaaattgagtgggagctacagaaagaaaacagcaaacgttggaatccagagattcagtacacttccaactacaacaagtctgttaatgtggactttactgtagacactaatggtgtttatagtgaacctcgccctattggaacccggtatctcacacgaaacttgtaa

SEQ ID NO: 607 - protein, 735 aa, Artificial Sequence
  Description of Artificial Sequence: Synthetic polypeptide
MAADGYLPDWLEDNLSEGIREWWALKPGVPQPKANQQHQDNRRGLVLPGYKYLGPGNGLDKGEPVNEADAAALEHDKAYDQQLKAGDNPYLKYNHADAEFQERLQEDTSFGGNLGRAVFQAKKGILEPLGLVEEAAKTAPGKKRPVDQSPQEPDSSSGVGKSGKQPARKRLNFGQTGDSESVPDPQPLGEPPAAPTSLGSNTMASGGGAPMADNNEGADGVGNSSGNWHCDSQWLGDRVITTSTRTWALPTYNNHLYKQISSQSGASNDNHYFGYSTPWGYFDFNRFHCHFSPRDWQRLINNNWGFRPKKLSFKLFNIQVKEVTQNDGTTTIANNLTSTVQVFTDSEYQLPYVFGSAHQGCLPPFPADVFMVPQYGYLTLNNGSQAVGRSSFYCLEYFPSQMLRTGNNFQFSYTFEDVPFHSSYAHSQSSDRLMNPLIDQYLYYLNRTQGTTSGTTNQSRLLFSQAGPQSMSLQARNWLPGPCYRQQRLSKTANDNNNSNFPTAASKYHLNGRDSLVNPGPAMASHKDDEEKFFPMHGNLIFGKEGTTASNAELDNVMITDEEEIRTTNPVATEQYGTVANNLQSSNTAPTTRTVNDQGALPGMVWQDRDVYLQGPIWAKIPHTDGHFHPSPLMGGFGLKHPPPQIMIKNTPVPANPPTTFSPAKFASFITQYSTGQVSVEIEWELQKENSKRWNPEIQYTSNYNKSVNVDFTVDTNGVYSEPRPIGTRYLTRNL

SEQ ID NO: 608 - DNA, 2211 bp, Artificial Sequence
  Description of Artificial Sequence: Synthetic polynucleotide
atggctgctgacggttatcttccagattggctcgaggacaacctttctgaaggcattcgtgagtggtgggctctgaaacctggagtccctcaacccaaagcgaaccaacaacaccaggacaaccgtcggggtcttgtgcttccgggttacaaatacctcggacccggtaacggactcgacgaaggagagccggtcaacgaggcggacgcggcagccctcgaacacgacaaagcttacgaccagcagctcaaggccggtgacaacccgtacctcaagtacaaccacgccgacgccgagtttcaggagcgtcttcaagaagatacgtcttttgggggcaaccttggcagagcagtcttccaggccaaaaagaggatccttgagcctcttggtctggttgagggagcagctaaaacggctcctggaaagaagaggcctgtagatcagtctcctcaggaaccggactcatcatctggtgttggcaaatcgggcaaacagcctgccagaaaaagactaaatttcggtcagactggcgactcagagtcagtcccagaccctcaacctctcggagaaccaccagcagcccccacaagtttgggatctaatacaatggcttcaggcggtggcgcaccaatggcagacaataacgagggtgccgatggagtgggtaattcctcaggaaattggcattgcgattcccaatggctgggcgacagagtcatcaccaccagcaccagaacctgggccctgcccacttacaacagccacctctacaagcaaatctccagccaatcaggagcttcaaacgacaaccactactttggctacagcaccccttgggggtattttgactttaacagattccactgccacttctcaccacgtgactggcagcgactcattaacaacaactggggattccggcccaagaaactcagcttcaagctcttcaacatccaagttaaagaggtcacgcagaacgatggcacgacgactattgccaataaccttaccagcacggttcaagtgtttacggactcggagtatcagctcccgtacgtgctcgggtcggcgcaccaaggctgtctcccgccgtttccagcggacgtcttcatggtccctcagtatggatacctcaccctgaacaacggaagtcaagcggtgggacgctcatccttttactgcctggagtacttcccttcgcagatgctaaggactggaaataacttccaattcagctataccttcgaggatgtaccttttcacagcagctacgctcacagccagagtttggatcgcttgatgaatcctcttattgatcagtatctgtactacctgaacagaacgcaaggaacaacctctggaacaaccaaccaatcacggctgctttttagccaggctgggcctcagtctatgtctttgcaggccagaaattggctacctgggccctgctaccggcaacagagactttcaaagactgctaacgacaacaacaacagtaactttccttggacagcggccagcaaatatcatctcaatggccgcgactcgctggtgaatccaggaccagctatggccagtcacaaggacgatgaagaaaaatttttccctatgcacggcaatctaatatttggcaaagaagggacaacggcaagtaacgcagaattagataatgtaatgattacggatgaagaagagattcgtaccaccaatcctgtggcaacagagcagtatggaactgtggcaaataacttgcagagctcaaatacagctcccacgactagaactgtcaatgatcagggggccttacctggcatggtgtggcaagatcgtgacgtgtaccttcaaggacctatctgggcaaagattcctcacacggatggacactttcatccttctcctctgatgggaggctttggactgaaacatccgcctcctcaaatcatgatcaaaaatactccggtaccggcaaatcctccgacgactttcagcccggccaagtttgcttcatttatcactcagtactccactggacaggtcagcgtggaaattgagtgggagctacagaaagaaaacagcaaacgttggaatccagagattcagtacacttccaactacaacaagtctgttaatgtggactttactgtagacactaatggtgtttatagtgaacctcgccctattggaacccggtatctcacacgaaacttgtaa

SEQ ID NO: 609 - protein, 736 aa, Artificial Sequence
  Description of Artificial Sequence: Synthetic polypeptide
MAADGYLPDWLEDNLSEGIREWWALKPGVPQPKANQQHQDNRRGLVLPGYKYLGPGNGLDEGEPVNEADAAALEHDKAYDQQLKAGDNPYLKYNHADAEFQERLQEDTSFGGNLGRAVFQAKKRILEPLGLVEGAAKTAPGKKRPVDQSPQEPDSSSGVGKSGKQPARKRLNFGQTGDSESVPDPQPLGEPPAAPTSLGSNTMASGGGAPMADNNEGADGVGNSSGNWHCDSQWLGDRVITTSTRTWALPTYNSHLYKQISSQSGASNDNHYFGYSTPWGYFDFNRFHCHFSPRDWQRLINNNWGFRPKKLSFKLFNIQVKEVTQNDGTTTIANNLTSTVQVFTDSEYQLPYVLGSAHQGCLPPFPADVFMVPQYGYLTLNNGSQAVGRSSFYCLEYFPSQMLRTGNNFQFSYTFEDVPFHSSYAHSQSLDRLMNPLIDQYLYYLNRTQGTTSGTTNQSRLLFSQAGPQSMSLQARNWLPGPCYRQQRLSKTANDNNNSNFPWTAASKYHLNGRDSLVNPGPAMASHKDDEEKFFPMHGNLIFGKEGTTASNAELDNVMITDEEEIRTTNPVATEQYGTVANNLQSSNTAPTTRTVNDQGALPGMVWQDRDVYLQGPIWAKIPHTDGHFHPSPLMGGFGLKHPPPQIMIKNTPVPANPPTTFSPAKFASFITQYSTGQVSVEIEWELQKENSKRWNPEIQYTSNYNKSVNVDFTVDTNGVYSEPRPIGTRYLTRNL

SEQ ID NO: 610 - DNA, 2175 bp, Artificial Sequence
  Description of Artificial Sequence: Synthetic polynucleotide
atgtcttttgttgatcaccctccagattggttggaagaagttggtgaaggtcttcgcgagtttttgggccttgaagcgggcccaccgaaaccaaaacccaatcagcagcatcaagatcaagcccgtggtcttgtgctgcctggttataactatctcggacccggaaacggtctcgatcgaggagagcctgtcaacagggcagacgaggtcgcgcgagagcacgacatctcgtacaacgagcagcttgaggcgggagacaacccctacctcaagtacaaccacgcggacgccgagtttcaggagaagctcgccgacgacacgtccttcgggggaaacctcggaaaggcagtctttcaggccaagaaaagggttctcgaaccttttggcctggttgaagagggtgctaagacggcccctaccggaaagcggatagacgaccactttccaaaaagaaagaaggcccggaccgaagaggactccaagccttccacctcgtcagacgccgaagctggacccagcggatcccagcagctgcaaatcccagcccaaccagcctcaagtttgggagctgatacaatgtctgcgggaggtggcggcccattgggcgacaataaccaaggtgccgatggagtgggcaatgcctcgggagattggcattgcgattccacgtggatgggggacagagtcgtcaccaagtccacccgaacctgggtgctgcccagctacaacaaccaccagtaccgagagatcaaaagcggctccgtcgacggaagcaacgccaacgcctactttggatacagcaccccctgggggtactttgactttaaccgcttccacagccactggagcccccgagactggcaaagactcatcaacaactactggggcttcagaccccggtccctcagagtcaaaatcttcaacattcaagtcaaagaggtcacggtgcaggactccaccaccaccatcgccaacaacctcacctccaccgtccaagtgtttacggacgacgactaccagctgccctacgtcgtcggcaacgggaccgagggatgcctgccggccttccctccgcaggtctttacgctgccgcagtacggttacgcgacgctgaaccgcgacaacacagaaaatcccaccgagaggagcagcttcttctgcctagagtactttcccagcaagatgctgagaacgggcaacaactttgagtttacctacaactttgaggaggtgcccttccactccagcttcgctcccagtcagaacctcttcaagctggccaacccgctggtggaccagtacttgtaccgcttcgtgagcacaaataacactggcggagtccagttcaacaagaacctggccgggagatacgccaacacctacaaaaactggttcccggggcccatgggccgaacccagggctggaacctgggctccggggtcaaccgcgccagtgtcagcgccttcgccacgaccaataggatggagctcgagggcgcgagttaccaggtgcccccgcagccgaacggcatgaccaacaacctccagggcagcaacacctatgccctggagaacactatgatcttcaacagccagccggcgaacccgggcaccaccgccacgtacctcgagggcaacatgctcatcaccagcgagagcgagacgcagccggtgaaccgcgtggcgtacaacgtcggcgggcagatggccaccaacaaccagagctccaccactgcccccgcgaccggcacgtacaacctccaggaaatcgtgcccggcagcgtgtggatggagagggacgtgtacctccaaggacccatctgggccaagatcccagagacgggggtgcactttcacccctctccggccatgggcggattcggactcaaacacccaccgcccatgatgctcatcaagaacacgcctgtgcccggaaatatcaccagcttctcggacgtgcccgtcagcagcttcatcacccagtacagcaccgggcaggtcaccgtggagatggagtgggagctcaagaaggaaaactccaagaggtggaacccagagatccagtacacaaacaactacaacgacccccagtttgtggactttgccccggacagcaccggggaatacagaaccaccagacctatcggaacccgataccttacccgacccctttaa

SEQ ID NO: 611 - protein, 724 aa, Artificial Sequence
  Description of Artificial Sequence: Synthetic polypeptide
MSFVDHPPDWLEEVGEGLREFLGLEAGPPKPKPNQQHQDQARGLVLPGYNYLGPGNGLDRGEPVNRADEVAREHDISYNEQLEAGDNPYLKYNHADAEFQEKLADDTSFGGNLGKAVFQAKKRVLEPFGLVEEGAKTAPTGKRIDDHFPKRKKARTEEDSKPSTSSDAEAGPSGSQQLQIPAQPASSLGADTMSAGGGGPLGDNNQGADGVGNASGDWHCDSTWMGDRVVTKSTRTWVLPSYNNHQYREIKSGSVDGSNANAYFGYSTPWGYFDFNRFHSHWSPRDWQRLINNYWGFRPRSLRVKIFNIQVKEVTVQDSTTTIANNLTSTVQVFTDDDYQLPYVVGNGTEGCLPAFPPQVFTLPQYGYATLNRDNTENPTERSSFFCLEYFPSKMLRTGNNFEFTYNFEEVPFHSSFAPSQNLFKLANPLVDQYLYRFVSTNNTGGVQFNKNLAGRYANTYKNWFPGPMGRTQGWNLGSGVNRASVSAFATTNRMELEGASYQVPPQPNGMTNNLQGSNTYALENTMIFNSQPANPGTTATYLEGNMLITSESETQPVNRVAYNVGGQMATNNQSSTTAPATGTYNLQEIVPGSVWMERDVYLQGPIWAKIPETGVHFHPSPAMGGFGLKHPPPMMLIKNTPVPGNITSFSDVPVSSFITQYSTGQVTVEMEWELKKENSKRWNPEIQYTNNYNDPQFVDFAPDSTGEYRTTRPIGTRYLTRPL

SEQ ID NO: 612 - DNA, 2175 bp, Artificial Sequence
  Description of Artificial Sequence: Synthetic polynucleotide
  misc_feature (1652)..(1652): n is a, c, g or t
atgtcttttgttgatcaccctccagattggttggaagaagttggtgaaggtcttcgcgagtttttgggccttgaagcgggcccaccgaaaccaaaacccaatcagcagcatcaagatcaagcccgtggtcttgtgctgcctggttataactatctcggacccggaaacggtctcgatcgaggagagcctgtcaacagggcagacgaggtcgcgcgagagcacgacatctcgtacaacgagcagcttgaggcgggagacaacccctacctcaagtacaaccacgcggacgccgagtttcaggagaagctcgccgacgacacatccttcgggggaaacctcggaaaggcagtctttcaggccaagaaaagggttctcgaaccttttggcctggttgaagagggtgctaagacggcccctaccggaaagcggatagacgaccactttccaaaaagaaagaaggcccggaccgaggaggactccaagccttccacctcgtcagacgccgaagctggacccagcggatcccagcagctgcaaatcccagcccaaccagcctcaagtttgggagctgatacaatgtctgcgggaggtggcggcccattgggcgacaataaccaaggtgccgatggagtgggcaatgcctcgggagattggcattgcgattccacgtggatgggggacagagtcgtcaccaagtccacccgaacctgggtgctgcccagctacaacaaccaccagtaccgagagatcaaaagcggctccgtcgacggaagcaacgccaacgcctactttggatacagcaccccctgggggtactttgactttaaccgcttccacagccactggagcccccgagactggcaaagactcatcaacaactactggggcttcagaccccggtccctcagagtcaaaatcttcaacattcaagtcaaagaggtcacggtgcaggactccaccaccaccatcgccaacaacctcacctccaccgtccaagtgtttacggacgacgactaccagctgccctacgtcgtcggcaacgggaccgagggatgcctgccggccttccctccgcaggtctttacgctgccgcagtacggttacgcgacgctgaaccgcgacaacacagaaaatcccaccgagaggagcagcttcttctgcctagagtactttcccagcaagatgctgagaacgggcaacaactttgagtttacctacaactttgaggaggtgcccttccactccagcttcgctcccagtcagaacctcttcaagctggccaacccgctggtggaccagtacttgtaccgcttcgtgagcacaaataacactggcggagtccagttcaacaagaacctggccgggagatacgccaacacctacaaaaactggttcccggggcccatgggccgaacccagggctggaacctgggctccggggtcaaccgcgccagtgtcagcgccttcgccacgaccaataggatggagctcgagggcgcgagttaccaggtgcccccgcagccgaacggcatgaccaacaacctccagggcagcaacacctatgccctggagaacactatgatcttcaacagccagccggcgaacccgggcaccaccgccacgtacctcgagggcagcatgctcatcaccancgagagcgagacgcagccggtgaaccgcgtggcgtacaacgtcggcgggcagatggccaccaacaaccagagctccaccactgcccccgcgaccggcacgtacaacctccaggaaatcgtgcccggcagcgtgtggatggagagggacgtgtacctccaaggacccatctgggccaagatcccagagacgggggcgcactttcacccctctccggccatgggcggattcggactcaaacacccaccgcccatgatgctcatcaagaacacgcctgtgcccggaaatatcaccagcttctcggacgtgcccgtcagcagcttcatcacccagtacagcaccgggcaggtcaccgtggagatggagtgggagctcaagaaggaaaactccaagaggtggaacccagagatccagtacacaaacaactacaacgacccccagtttgtggactttgccccggacagcaccggggaatacagaaccaccagacctatcggaacccgataccttacccgacccctttaa

SEQ ID NO: 613 - protein, 724 aa, Artificial Sequence
  Description of Artificial Sequence: Synthetic polypeptide
  MOD_RES (551)..(551): Xaa = any amino acid
MSFVDHPPDWLEEVGEGLREFLGLEAGPPKPKPNQQHQDQARGLVLPGYNYLGPGNGLDRGEPVNRADEVAREHDISYNEQLEAGDNPYLKYNHADAEFQEKLADDTSFGGNLGKAVFQAKKRVLEPFGLVEEGAKTAPTGKRIDDHFPKRKKARTEEDSKPSTSSDAEAGPSGSQQLQIPAQPASSLGADTMSAGGGGPLGDNNQGADGVGNASGDWHCDSTWMGDRVVTKSTRTWVLPSYNNHQYREIKSGSVDGSNANAYFGYSTPWGYFDFNRFHSHWSPRDWQRLINNYWGFRPRSLRVKIFNIQVKEVTVQDSTTTIANNLTSTVQVFTDDDYQLPYVVGNGTEGCLPAFPPQVFTLPQYGYATLNRDNTENPTERSSFFCLEYFPSKMLRTGNNFEFTYNFEEVPFHSSFAPSQNLFKLANPLVDQYLYRFVSTNNTGGVQFNKNLAGRYANTYKNWFPGPMGRTQGWNLGSGVNRASVSAFATTNRMELEGASYQVPPQPNGMTNNLQGSNTYALENTMIFNSQPANPGTTATYLEGSMLITXESETQPVNRVAYNVGGQMATNNQSSTTAPATGTYNLQEIVPGSVWMERDVYLQGPIWAKIPETGAHFHPSPAMGGFGLKHPPPMMLIKNTPVPGNITSFSDVPVSSFITQYSTGQVTVEMEWELKKENSKRWNPEIQYTNNYNDPQFVDFAPDSTGEYRTTRPIGTRYLTRPL

SEQ ID NO: 614 - DNA, 2208 bp, Artificial Sequence
  Description of Artificial Sequence: Synthetic polynucleotide
atggctgccgatggttatcttccagattggctcgaggacaaccttagtgaaggaattcgcgagtggtgggctttgaaacctggagcccctcaacccaaggcaaatcaacaacatcaagacaacgctcgaggtcttgtgcttccgggttacaaataccttggacccggcaacggactcgacaagggggagccggtcaacgcagcagacgcggcggccctcgagcacgacaaggcctacgaccagcagctcaaggccggagacaacccgtacctcaagtacaaccacgccgacgccgagttccaggagcggctcaaagaagatacgtcttttgggggcaacctcgggcgagcagtcttccaggccaaaaagaggcttcttgaacctcttggtctggttgaggaagcggctaagacggctcctggaaagaagaggcctgtagagcagtctcctcaggaaccggactcctccgcgggtattggcaaatcgggtgcacagcccgctaaaaagagactcaatttcggtcagactggcgacacagagtcagtcccagaccctcaaccaatcggagaacctcccgcagccccctcaggtgtgggatctcttacaatggcttcaggtggtggcgcaccagtggcagacaataacgaaggtgccgatggagtgggtagttcctcgggaaattggcattgcgattcccaatggctgggggacagagtcatcaccaccagcacccgaacctgggccctgcccacctacaacaatcacctctacaagcaaatctccaacagcacatctggaggatcttcaaatgacaacgcctacttcggctacagcaccccctgggggtattttgacttcaacagattccactgccacttctcaccacgtgactggcagcgactcatcaacaacaactggggattccggcctaagcgactcaacttcaagctcttcaacattcaggtcaaagaggttacggacaacaatggagtcaagaccatcgccaataaccttaccagcacggtccaggtcttcacggactcagactatcagctcccgtacgtgctcgggtcggctcacgagggctgcctcccgccgttcccagcggacgttttcatgattcctcagtacgggtatctgacgcttaatgatggaagccaggccgtgggtcgttcgtccttttactgcctggaatatttcccgtcgcaaatgctaagaacgggtaacaacttccagttcggctacgagtttgagaacgtacctttccatagcagctacgctcacagccaaagcctggaccgactaatgaatccactcatcgaccaatacttgtactatctctcaaagactattaacggttctggacagaatcaacaaacgctaaaattcagtgtggccggacccagcaacatggctgtccagggaagaaactacatacctggacccagctaccgacaacaacgtgtctcaaccactgtgactcaaaacaacaacagcgaatttgcttggcctggagcttcttcttgggctctcaatggacgtaatagcttgatgaatcctggacctgctatggccagccacaaagaaggagaggaccgtttctttcctttgtctggatctttaatttttggcaaacaaggaactggaagagacaacgtggatgcggacaaagtcatgataaccaacgaagaagaaattaaaactactaacccggtagcaacggagtcctatggacaagtggccacaaaccaccagagtgcccaagcacaggcgcagaccggctgggttcaaaaccaaggaatacttccgggtatggtttggcaggacagagatgtgtacctgcaaggacccatttgggccaaaattcctcacacggacggcaactttcacccttctccgctgatgggagggtttggaatgaagcacccgcctcctcagatcctcatcaaaaacacacctgtacctgcggatcctccaacggccttcaacaaggacaagctgaactctttcatcacccagtattctactggccaagtcagcgtggagatcgagtgggagctgcagaaggaaaacagcaagcgctgggacccggagatccagtacacttccaactattacaagtctaataatgttgaatttgctgttaatactgaaggtgtatatagtgaaccccgccccattggcaccagatacctgactcgtaatctg

SEQ ID NO: 615 - protein, 736 aa, Artificial Sequence
  Description of Artificial Sequence: Synthetic polypeptide
MAADGYLPDWLEDNLSEGIREWWALKPGAPQPKANQQHQDNARGLVLPGYKYLGPGNGLDKGEPVNAADAAALEHDKAYDQQLKAGDNPYLKYNHADAEFQERLKEDTSFGGNLGRAVFQAKKRLLEPLGLVEEAAKTAPGKKRPVEQSPQEPDSSAGIGKSGAQPAKKRLNFGQTGDTESVPDPQPIGEPPAAPSGVGSLTMASGGGAPVADNNEGADGVGSSSGNWHCDSQWLGDRVITTSTRTWALPTYNNHLYKQISNSTSGGSSNDNAYFGYSTPWGYFDFNRFHCHFSPRDWQRLINNNWGFRPKRLNFKLFNIQVKEVTDNNGVKTIANNLTSTVQVFTDSDYQLPYVLGSAHEGCLPPFPADVFMIPQYGYLTLNDGSQAVGRSSFYCLEYFPSQMLRTGNNFQFGYEFENVPFHSSYAHSQSLDRLMNPLIDQYLYYLSKTINGSGQNQQTLKFSVAGPSNMAVQGRNYIPGPSYRQQRVSTTVTQNNNSEFAWPGASSWALNGRNSLMNPGPAMASHKEGEDRFFPLSGSLIFGKQGTGRDNVDADKVMITNEEEIKTTNPVATESYGQVATNHQSAQAQAQTGWVQNQGILPGMVWQDRDVYLQGPIWAKIPHTDGNFHPSPLMGGFGMKHPPPQILIKNTPVPADPPTAFNKDKLNSFITQYSTGQVSVEIEWELQKENSKRWDPEIQYTSNYYKSNNVEFAVNTEGVYSEPRPIGTRYLTRNL

SEQ ID NO: 616 - DNA, 2208 bp, Artificial Sequence
  Description of Artificial Sequence: Synthetic polynucleotide
atggctgccgatggttatcttccagattggctcgaggacaaccttagtgaaggaattcgcgagtggtgggctttgaaacctggagcccctcaacccaaggcaaatcaacaacatcaagacaacgctcgaggtcttgtgcttccgggttacaaataccttggacccggcaacggactcgacaagggggagccggtcaacgcagcagacgcggcggccctcgagcacgacaaggcctacgaccagcagctcaaggccggagacaacccgtacctcaagtacaaccacgccgacgccgagttccaggagcggctcaaagaagatacgtcttttgggggcaacctcgggcgagcagtcttccaggccaaaaagaggcttcttgaacctcttggtctggttgaggaagcggctaagacggctcctggaaagaagaggcctgtagagcagtctcctcaggaaccggactcctccgcgggtattggcaaatcgggtgcacagcccgctaaaaagagactcaatttcggtcagactggcgacacagagtcagtcccagaccctcaaccaatcggagaacctcccgcagccccctcaggtgtgggatctcttacaatggcttcaggtggtggcgcaccagtggcagacaataacgaaggtgccgatggagtgggtagttcctcgggaaattggcattgcgattcccaatggctgggggacagagtcatcaccaccagcacccgaacctgggccctgcccacctacaacaatcacctctacaagcaaatctccaacagcacatctggaggatcttcaaatgacaacgcctacttcggctacagcaccccctgggggtattttgacttcaacagattccactgccgcttctcaccacgtgactggcagcgactcatcaacaacaactggggattccggcctaagcgactcaacttcaagctcttcaacattcaggtcaaagaggttacggacaacaatggagtcaagaccatcgccaataaccttaccagcacggtccaggtcttcacggactcagactatcagctcccgtacgtgctcgggtcggctcacgagggctgcctcccgccgttcccagcggacgttttcatgattcctcagtacgggtatctgacgcttaatgatggaagccaggccgtgggtcgttcgtccttttactgcctggaatatttcccgtcgcaaatgctaagaacgggtaacaacttccagttcagctacgagtttgagaacgtacctttccatagcagctacgctcacagccaaagcctggaccgactaatgaatccactcatcgaccaatacttgtactatctctcaaagactattaacggttctggacagaatcaacaaacgctaaaattcagtgtggccggacccagcaacatggctgtccagggaagaaactacatacctggacccagctaccgacaacaacgtgtctcaaccactgtgactcaaaacaacaacagcgaatttgcttggcctggagcttcttcttgggctctcaatggacgtaatagcttgatgaatcctggacctgctatggccagccacaaagaaggagaggaccgtttctttcctttgtctggatctttaatttttggcaaacaaggaactggaagagacaacgtggatgcggacaaagtcatgataaccaacgaagaagaaattaaaactactaacccggtagcaacggagtcctatggacaagtggccacaaaccaccagagtgcccaagcacaggcgcagaccggctgggttcaaaaccaaggaatacttccgggtatggtttggcaggacagagatgtgtacctgcaaggacccatttgggccaaaattcctcacacggacggcaactttcacccttctccgctgatgggagggtttggaatgaagcacccgcctcctcagatcctcatcaaaaacgcccctgtacctgcggatcctccaacggccttcaacaaggacaagctgaactctttcatcacccagtattctactggccaagtcagcgtggagatcgagtgggagctgcagaaggaaaacagcaagcgctggaacccggagatccagtacacttccaactattacaagtctaataatgttgaatttgctgttaatactgaaggtgtatatagtgaaccccgccccattggcaccagatacctgactcgtaatctg

SEQ ID NO: 617 - protein, 736 aa, Artificial Sequence
  Description of Artificial Sequence: Synthetic polypeptide
MAADGYLPDWLEDNLSEGIREWWALKPGAPQPKANQQHQDNARGLVLPGYKYLGPGNGLDKGEPVNAADAAALEHDKAYDQQLKAGDNPYLKYNHADAEFQERLKEDTSFGGNLGRAVFQAKKRLLEPLGLVEEAAKTAPGKKRPVEQSPQEPDSSAGIGKSGAQPAKKRLNFGQTGDTESVPDPQPIGEPPAAPSGVGSLTMASGGGAPVADNNEGADGVGSSSGNWHCDSQWLGDRVITTSTRTWALPTYNNHLYKQISNSTSGGSSNDNAYFGYSTPWGYFDFNRFHCRFSPRDWQRLINNNWGFRPKRLNFKLFNIQVKEVTDNNGVKTIANNLTSTVQVFTDSDYQLPYVLGSAHEGCLPPFPADVFMIPQYGYLTLNDGSQAVGRSSFYCLEYFPSQMLRTGNNFQFSYEFENVPFHSSYAHSQSLDRLMNPLIDQYLYYLSKTINGSGQNQQTLKFSVAGPSNMAVQGRNYIPGPSYRQQRVSTTVTQNNNSEFAWPGASSWALNGRNSLMNPGPAMASHKEGEDRFFPLSGSLIFGKQGTGRDNVDADKVMITNEEEIKTTNPVATESYGQVATNHQSAQAQAQTGWVQNQGILPGMVWQDRDVYLQGPIWAKIPHTDGNFHPSPLMGGFGMKHPPPQILIKNAPVPADPPTAFNKDKLNSFITQYSTGQVSVEIEWELQKENSKRWNPEIQYTSNYYKSNNVEFAVNTEGVYSEPRPIGTRYLTRNL

SEQ ID NO: 618 - DNA, 2208 bp, Artificial Sequence
  Description of Artificial Sequence: Synthetic polynucleotide
atggctgccgatggttatcttccagattggctcgaggacaaccttagtgaaggaattcgcgagtggtgggctttgaaacctggagcccctcaacccaaggcaaatcaacaacatcaagacaacgctcgaggtcttgtgcttccgggttacaaataccttggacccggcaacggactcgacaagggggagccggtcagcgcagcagacgcggcggccctcgagcacgacaaggcctacgaccagcagctcaaggccggagacaacccgtacctcaagtacaaccacgccgacgccgagttccaggagcggctcaaagaagatacgtcttttgggggcaacctcgggcgagcagtcttccaggccaaaaagaggcttcttgaacctcttggtctggttgaggaagcggctaagacggctcctggaaagaagaggcctgtagagcagtctcctcaggaaccggactcctccgcgggtattggcaaatcgggtgcacagcccgctaaaaagagactcaatttcggtcagactggcgacacagagtcagtcccagaccctcaaccaatcggagaacctcccgcagccccctcaggtgtgggatctcttacaatggcttcaggtggtggcgcaccagtggcagacaataacgaaggtgccgatggagtgggtagttcctcgggaaattggcattgcgattcccaatggctgggggacagagtcatcaccaccagcacccgaacctgggccctgcccacctacaacaatcacctctacaagcaaatctccaacagcacatctggaggatcttcaaatgacaacgcctacttcggctacagcaccccctgggggtattttgacttcaacagattccactgccacttctcaccgcgtgactggcagcgactcatcaacaacaactggggattccggcctaagcgactcaacttcaagctcttcaacattcaggtcaaagaggttacggacaacaatggagtcaagaccatcgccaataaccttaccagcacggtccaggtcttcacggactcagactatcagctcccgtacgtgctcgggtcggctcacgagggctgcctcccgccgttcccagcggacgttttcatgattcctcagtacgggtatctgacgcttaatgatggaagccaggccgtgggtcgttcgtccttttactgcctggaatatttcccgtcgcaaatgctaagaacgggtaacaacttccagttcagctacgagtttgagaacgtacctttccatagcagctacgctcacagccaaagcctggaccgactaatgaatccactcatcgaccaatacttgtactatctctcaaagactattaacggttctggacagaatcaacaaacgctaaaattcagtgtggccggacccagcaacatggctgtccagggaagaaactacatacctggacccagctaccgacaacaacgtgtctcaaccactgtgactcaaaacaacaacagcgaatttgcttggcctggagcttcttcttgggctctcaatggacgtaatagcttgatgaatcctggacctgctatggccagccacaaagaaggagaggaccgtttctttcctttgtctggatctttaatttttggcaaacaaggaactggaagagacaacgtggatgcggacaaagtcatgataaccaacgaagaagaaattaaaactactaacccggtagcaacggagtcctatggacaagtggccacaaaccaccagagtgcccaagcacaggcgcagaccggctgggttcaaaaccaaggaatacttccgggtatggtttggcaggacagagatgtgtacctgcaaggacccatttgggccaaaattcctcacacggacggcaactttcacccttctccgctgatgggagggtttggaatgaagcacccgcctcctcagatcctcatcaaaaacacacctgtacctgcggatcctccaacggccttcaacaaggacaagctgaactctttcatcacccagtattctactggccaagtcagcgtggagatcgagtgggagctgcagaaggaaaacagcaagcgctggaacccggagatccagtacacttccaactattacaagtctaataatgttgaatttgctgttaatactgaaggtgtatatagtgaaccccgccccattggcaccagatacctgactcgtaatctg

SEQ ID NO: 619 - protein, 736 aa, Artificial Sequence
  Description of Artificial Sequence: Synthetic polypeptide
MAADGYLPDWLEDNLSEGIREWWALKPGAPQPKANQQHQDNARGLVLPGYKYLGPGNGLDKGEPVSAADAAALEHDKAYDQQLKAGDNPYLKYNHADAEFQERLKEDTSFGGNLGRAVFQAKKRLLEPLGLVEEAAKTAPGKKRPVEQSPQEPDSSAGIGKSGAQPAKKRLNFGQTGDTESVPDPQPIGEPPAAPSGVGSLTMASGGGAPVADNNEGADGVGSSSGNWHCDSQWLGDRVITTSTRTWALPTYNNHLYKQISNSTSGGSSNDNAYFGYSTPWGYFDFNRFHCHFSPRDWQRLINNNWGFRPKRLNFKLFNIQVKEVTDNNGVKTIANNLTSTVQVFTDSDYQLPYVLGSAHEGCLPPFPADVFMIPQYGYLTLNDGSQAVGRSSFYCLEYFPSQMLRTGNNFQFSYEFENVPFHSSYAHSQSLDRLMNPLIDQYLYYLSKTINGSGQNQQTLKFSVAGPSNMAVQGRNYIPGPSYRQQRVSTTVTQNNNSEFAWPGASSWALNGRNSLMNPGPAMASHKEGEDRFFPLSGSLIFGKQGTGRDNVDADKVMITNEEEIKTTNPVATESYGQVATNHQSAQAQAQTGWVQNQGILPGMVWQDRDVYLQGPIWAKIPHTDGNFHPSPLMGGFGMKHPPPQILIKNTPVPADPPTAFNKDKLNSFITQYSTGQVSVEIEWELQKENSKRWNPEIQYTSNYYKSNNVEFAVNTEGVYSEPRPIGTRYLTRNL

SEQ ID NO: 620 - DNA, 2208 bp, Artificial Sequence
  Description of Artificial Sequence: Synthetic polynucleotide
atggctgccgatggttatcttccagattggctcgaggacaaccttagtgaaggaattcgcgagtggtgggctttgaaacctggagcccctcaacccaaggcaaatcaacaacatcaagacaacgctcgaggtcttgtgcttccgggttacaaataccttggacccggcaacggactcgacaagggggagccggtcaacgcagcagacgcggcggccctcgagcacgacaaggcctacgaccagcagctcaaggccggagacaacccgtacctcaagtacaaccacgccgacgccgagttccaggagcggctcaaagaagatacgtcttttgggggcaacctcgggcgagcagtcttccaggccaaaaagaggcttcttgaacctcttggtctggttgaggaagcggctaagacggctcctggaaagaagaggcctgtagagcagtctcctcaggaaccggactcctccgcgggtattggcaaatcgggtgcacagcccgctaaaaagagactcaatttcggtcagactggcgacacagagtcagtcccagaccctcaaccaatcggagaacctcccgcagccccctcaggtgtgggatctcttacaatggcttcaggtggtggcgcaccagtggcagacaataacgaaggtgccgatggagtgggtagttcctcgggaaattggcattgcgattcccaatggctgggggacagagtcatcaccaccagcacccgaacctgggccctgcccacctacaacaatcacctctacaagcaaatctccaacagcacatctggaggatcttcaaatgacaacgcctacttcggctacagcaccccctgggggtattttgacttcaacagattccactgccacttctcaccacgtgactggcagcgactcatcaacaacaactggggattccggcctaagcgactcaacttcaagctcttcaacattcaggtcaaagaggttacggacaacaatggagtcaagaccatcgccaataaccttaccagcacggtccaggtcttcacggactcagactatcagctcccgtacgtgctcgggtcggctcacgagggctgcctcccgccgttcccagcggacgttttcatgattcctcagtacgggtatctgacgcttaatgatggaagccaggccgtgggtcgttcgtccttttactgcctggaatatttcccgtcgcaaatgctaagaacgggtaacaacttccagttcagctacgagtttgagaacgtacctttccatagcagctacgctcacagccaaagcctggaccgactaatgaatccactcatcgaccaatacttgtactatctctcaaagactattaacggttctggacagaatcaacaaacgctaaaattcagtgtggccggacccagcaacacggctgtccagggaagaaactacatacctggacccagctaccgacaacaacgtgtctcaaccactgtgactcaaaacaacaacagcgaatttgcttggcctggagcttcttcttgggctctcaatggacgtaatagcttgatgaatcctggacctgctatggccagccacaaagaaggagaggaccgtttctttcctttgtctggatctttaatttttggcaaacaaggaactggaagagacaacgtggatgcggacaaagtcatgataaccaacgaagaagaaattaaaactactaacccggtagcaacggagtcctatggacaagtggccacaaaccaccagagtgcccaagcacaggcgcagaccggctgggttcaaaaccaaggaatacttccgggtatggtttggcaggacagagatgtgtacctgcaaggacccatttgggccaaaattcctcacacggacggcaactttcacccttctccgctgatgggagggtttggaatgaagcacccgcctcctcagatcctcatcaaaaacacacctgtacctgcggatcctccaacggccttcaacaaggacaagctgaactctttcatcacccagtattctactggccaagtcagcgtggagatcgagtgggagctgcagaaggaaaacagcaagcgctggaacccggagatccagtacacttccaactattacaagtctaataatgttgaatttgctgttaatactgaaggtgtatatagtgaaccccgccccattggcaccagatacctgactcgtaatctg

SEQ ID NO: 621 - protein, 736 aa, Artificial Sequence
  Description of Artificial Sequence: Synthetic polypeptide
MAADGYLPDWLEDNLSEGIREWWALKPGAPQPKANQQHQDNARGLVLPGYKYLGPGNGLDKGEPVNAADAAALEHDKAYDQQLKAGDNPYLKYNHADAEFQERLKEDTSFGGNLGRAVFQAKKRLLEPLGLVEEAAKTAPGKKRPVEQSPQEPDSSAGIGKSGAQPAKKRLNFGQTGDTESVPDPQPIGEPPAAPSGVGSLTMASGGGAPVADNNEGADGVGSSSGNWHCDSQWLGDRVITTSTRTWALPTYNNHLYKQISNSTSGGSSNDNAYFGYSTPWGYFDFNRFHCHFSPRDWQRLINNNWGFRPKRLNFKLFNIQVKEVTDNNGVKTIANNLTSTVQVFTDSDYQLPYVLGSAHEGCLPPFPADVFMIPQYGYLTLNDGSQAVGRSSFYCLEYFPSQMLRTGNNFQFSYEFENVPFHSSYAHSQSLDRLMNPLIDQYLYYLSKTINGSGQNQQTLKFSVAGPSNTAVQGRNYIPGPSYRQQRVSTTVTQNNNSEFAWPGASSWALNGRNSLMNPGPAMASHKEGEDRFFPLSGSLIFGKQGTGRDNVDADKVMITNEEEIKTTNPVATESYGQVATNHQSAQAQAQTGWVQNQGILPGMVWQDRDVYLQGPIWAKIPHTDGNFHPSPLMGGFGMKHPPPQILIKNTPVPADPPTAFNKDKLNSFITQYSTGQVSVEIEWELQKENSKRWNPEIQYTSNYYKSNNVEFAVNTEGVYSEPRPIGTRYLTRNL

SEQ ID NO: 622 - DNA, 2208 bp, Artificial Sequence
  Description of Artificial Sequence: Synthetic polynucleotide
atggctgccgatggttatcttccagattggctcgaggacaaccttagtgaaggaattcgcgagtggtgggctttgaaacctggagcccctcaacccaaggcaaatcaacaacatcaagacaacgctcgaggtcttgtgcttccgggttacaaataccttggacccggcaacggactcgacaagggggagccggtcaacgcagcagacgcggcggccctcgagcacgacaaggcctacgaccagcagctcaaggccggagacaacccgtacctcaagtacaaccacgccgacgccgagttccaggagcggctcaaagaagatacgtcttttgggggcaacctcgggcgagcagtcttccaggccaaaaagaggcttcttgaacctcttggtctggttgaggaagcggctaagacggctcctggaaagaagaggcctgtagagcagtctcctcaggaaccggactcctccgcgggtattggcaaatcgggtgcacagcccgctaaaaagagactcaatttcggtcagactggcgacacagagtcagtcccagaccctcaaccaatcggagaacctcccgcagccccctcaggtgtgggatctcttacaatggcttcaggtggtggcgcaccagtggcagacaataacgaaggtgccgatggagtgggtagttcctcgggaaattggcattgcgattcccaatggctgggggacagagtcatcaccaccagcacccgaacctgggccctgcccacctacaacaatcacctctacaagcaaatctccaacagcacatctggaggatcttcaaatgacaacgcctacttcggctacagcaccccctgggggtattttgacttcaacagattccactgccacttctcaccacgtgactggcagcgactcatcaacaacaactggggattccggcctaagcggctcaacttcaagctcttcaacattcaggtcaaagaggttacggacaacaatggagtcaagaccatcgccaataaccttaccagcacggtccaggtcttcacggactcagactatcagctcccgtacgtgctcgggtcggctcacgagggctgcctcccgccgttcccagcggacgttttcatgattcctcagtacgggtatctgacgcttaatgatggaagccaggccgtgggtcgttcgtccttttactgcctggaatatttcccgtcgcaaatgctaagaacgggtagcaacttccagttcagctacgagtttgagaacgtacctttccatagcagctacgctcacagccaaagcctggaccgactaatgaatccactcatcgaccaatacttgtactatctctcaaagactattaacggttctggacagaatcaacaaacgctaaaattcagtgtggccggacccagcaacatggctgtccagggaagaaactacatacctggacccagctaccgacaacaacgtgtctcaaccactgtgactcaaaacaacaacagcgaatttgcttggcctggagcttcttcttgggctctcaatggacgtaatagcttgatgaatcctggacctgctatggccagccacaaagaaggagaggaccgtttctttcctttgtctggatctttaatttttggcaaacaaggaactggaagagacaacgtggatgcggacaaagtcatgataaccaacgaagaagaaattaaaactactaacccggcagcaacggagtcctatggacaagtggccacaaaccaccagagtgcccaagcacaggcgcagaccggctgggttcaaaaccaaggaatacttccgggtatggtttggcaggacagagatgtgtacctgcaaggacccatttgggccaaaattcctcacacggacggcaactttcacccttctccgctgatgggagggtttggaatgaagcacccgcctcctcagatcctcatcaaaaacacacctgtacctgcggatcctccaacggccttcaacaaggacaagctgaactctttcatcacccagtattctactggccaagtcagcgtggagatcgagtgggagctgcagaaggaaaacagcaagcgctggaacccggagatccagcacacttccaactattacaagtctaataatgttgaatttgctgttaatactgaaggtgtatatagtgaaccccgccccattggcaccagatacctgactcgtaatctg

SEQ ID NO: 623 - DNA, 2208 bp, Artificial Sequence
  Description of Artificial Sequence: Synthetic polynucleotide
atggctgccgatggttatcttccagattggctcgaggacaaccttagtgaaggaattcgcgagtggtgggctttgaaacctggagcccctcaacccaaggcaaatcaacaacatcaagacaacgctcgaggtcttgtgcttccgggttacaaataccttggacccggcaacggactcgacaagggggagccggtcaacgcagcagacgcggcggccctcgagcacgacaaggcctacgaccagcagctcaaggccggagacaacccgtacctcaagtacaaccacgccgacgccgagttccaggagcggctcaaagaagatacgtcttttgggggcaacctcgggcgagcagtcttccaggccaaaaagaggcttcttgaacctcttggtctggttgaggaagcggctaagacggctcctggaaagaagaggcctgtagagcagtctcctcaggaaccggactcctccgcgggtattggcaaatcgggtgcacagcccgctaaaaagagactcaatttcggtcagactggcgacacagagtcagtcccagaccctcaaccaatcggagaacctcccgcagccccctcaggtgtgggatctcttacaatggcttcaggtggtggcgcaccagtggcagacaataacgaaggtgccgatggagtgggtagttcctcgggaaattggcattgcgattcccaatggctgggggacagagtcatcaccaccagcacccgaacctgggccctgcccacctacaacaatcacctctacaagcaaatctccaacagcacatctggaggatcttcaaatgacaacgcctacttcggctacagcaccccctgggggtattttgacttcaacagattccactgccacttctcaccacgtgactggcagcgactcatcaacaacaactggggattccggcctaagcgactcaacttcaggctcttcaacattcaggtcaaagaggttacggacaacaatggagtcaagaccatcgccaataaccttaccagcacggtccaggtcttcacggactcagactatcagctcccgtacgtgctcgggtcggctcacgagggctgcctcccgccgttcccagcggacgttttcatgattcctcagtacgggtatctgacgcttaatgatggaagccaggccgtgggtcgttcgtccttttactgcctggaatatttcccgtcgcaaatgctaagaacgggtaacaacttccagttcagctacgagtttgagaacgtacctttccatagcagctacgctcacagccaaagcctggaccgactaatgaatccactcatcgaccaatacttgtactatctctcaaagactattaacggttctggacagaatcaacaaacgctaaaattcagtgtggccggacccagcaacatggctgtccagggaagaaactacatacctggacccagctaccgacaacaacgtgtctcaaccactgtgactcaaaacaacaacagcgaatttgcttggcctggagcttcttcttgggctctcaatggacgtaatagcttgatgaatcctggacctgctatggccagccacaaagaaggagaggaccgtttctttcctttgtctggatctttaatttttggcaaacaaggaactggaagagacaacgtggatgcggacaaagtcatgataaccaacgaagaagaaattaaaactactaacccggtagcaacggagtcctatggacaagtggccacaaaccaccagagtgcccaagcacaggcgcagaccggctgggttcaaagccaaggaatacttccgggtatggtttggcaggacagagatgtgtacctgcaaggacccatttgggccaaaattcctcacacggacggcaactttcacccttctccgctgatgggagggtttggaatgaagcacccgcctccccagatcctcatcaaaaacacacctgtacctgcggatcctccaacggccttcaacaaggacaagctgaactctttcatcacccagtattctactggccaagtcagcgtggagatcgagtgggagctgcagaaggaaaacagcaagcgctggaacccggagatccagtacacttccaactattacaagtctaataatgttgaatttgctgttaatactgaaggtgtatatagtgaaccccgccccattggcaccagatacctgactcgtaatctg

SEQ ID NO: 624 - protein, 736 aa, Artificial Sequence
  Description of Artificial Sequence: Synthetic polypeptide
MAADGYLPDWLEDNLSEGIREWWALKPGAPQPKANQQHQDNARGLVLPGYKYLGPGNGLDKGEPVNAADAAALEHDKAYDQQLKAGDNPYLKYNHADAEFQERLKEDTSFGGNLGRAVFQAKKRLLEPLGLVEEAAKTAPGKKRPVEQSPQEPDSSAGIGKSGAQPAKKRLNFGQTGDTESVPDPQPIGEPPAAPSGVGSLTMASGGGAPVADNNEGADGVGSSSGNWHCDSQWLGDRVITTSTRTWALPTYNNHLYKQISNSTSGGSSNDNAYFGYSTPWGYFDFNRFHCHFSPRDWQRLINNNWGFRPKRLNFKLFNIQVKEVTDNNGVKTIANNLTSTVQVFTDSDYQLPYVLGSAHEGCLPPFPADVFMIPQYGYLTLNDGSQAVGRSSFYCLEYFPSQMLRTGSNFQFSYEFENVPFHSSYAHSQSLDRLMNPLIDQYLYYLSKTINGSGQNQQTLKFSVAGPSNMAVQGRNYIPGPSYRQQRVSTTVTQNNNSEFAWPGASSWALNGRNSLMNPGPAMASHKEGEDRFFPLSGSLIFGKQGTGRDNVDADKVMITNEEEIKTTNPAATESYGQVATNHQSAQAQAQTGWVQNQGILPGMVWQDRDVYLQGPIWAKIPHTDGNFHPSPLMGGFGMKHPPPQILIKNTPVPADPPTAFNKDKLNSFITQYSTGQVSVEIEWELQKENSKRWNPEIQHTSNYYKSNNVEFAVNTEGVYSEPRPIGTRYLTRNL

SEQ ID NO: 625 - protein, 736 aa, Artificial Sequence
  Description of Artificial Sequence: Synthetic polypeptide
MAADGYLPDWLEDNLSEGIREWWALKPGAPQPKANQQHQDNARGLVLPGYKYLGPGNGLDKGEPVNAADAAALEHDKAYDQQLKAGDNPYLKYNHADAEFQERLKEDTSFGGNLGRAVFQAKKRLLEPLGLVEEAAKTAPGKKRPVEQSPQEPDSSAGIGKSGAQPAKKRLNFGQTGDTESVPDPQPIGEPPAAPSGVGSLTMASGGGAPVADNNEGADGVGSSSGNWHCDSQWLGDRVITTSTRTWALPTYNNHLYKQISNSTSGGSSNDNAYFGYSTPWGYFDFNRFHCHFSPRDWQRLINNNWGFRPKRLNFRLFNIQVKEVTDNNGVKTIANNLTSTVQVFTDSDYQLPYVLGSAHEGCLPPFPADVFMIPQYGYLTLNDGSQAVGRSSFYCLEYFPSQMLRTGNNFQFSYEFENVPFHSSYAHSQSLDRLMNPLIDQYLYYLSKTINGSGQNQQTLKFSVAGPSNMAVQGRNYIPGPSYRQQRVSTTVTQNNNSEFAWPGASSWALNGRNSLMNPGPAMASHKEGEDRFFPLSGSLIFGKQGTGRDNVDADKVMITNEEEIKTTNPVATESYGQVATNHQSAQAQAQTGWVQSQGILPGMVWQDRDVYLQGPIWAKIPHTDGNFHPSPLMGGFGMKHPPPQILIKNTPVPADPPTAFNKDKLNSFITQYSTGQVSVEIEWELQKENSKRWNPEIQYTSNYYKSNNVEFAVNTEGVYSEPRPIGTRYLTRNL

SEQ ID NO: 626 - DNA, 2205 bp, Artificial Sequence
  Description of Artificial Sequence: Synthetic polynucleotide
atggctgccgatggttatcttccagattggctcgaggacaaccttagtgaaggaattcgcgagtggtgggctttgaaacctggagcccctcaacccaaggcaaatcaacaacatcaagacaacgcccgaggtcttgtgcttccgggttacaaataccttggacccggcaacggactcgacaagggggagccggtcaacgcagcagacgcggcggccctcgagcacgacaaggcctacgaccagcagctcaaggccggagacaacccgtacctcaagtacaaccacgccgacgccgagttccaggagcggctcaaagaagatacgtcttttgggggcaacctcgggcgagcagtcttccaggccaaaaagaggcttcttgaacctcttggtctggttgaggaagcggctaagacggctcctggaaagaagaggcctgtagagcagtctcctcaggaaccggactcctccgcgggtattggcaaatcgggtgcacagcccgctaaaaagagactcaatttcggtcagactggcgacacagagtcagtcccagaccctcaaccaatcggagaacctcccgcagccccctcaggtgtgggatctcttacaatggcttcaggtggtggcgcaccagtggcagacaataacgaaggtgccgatggagtgggtagttcctcgggaaattggcattgcgattcccaatggctgggggacagagtcatcaccaccagcacccgaacctgggccctgcccacctacaacaatcacctctacaagcaaatctccaacagcacatctggaggatcttcaaatgacaacgcctacttcggctacagcaccccctggaggtattttgacttcaacagattccactgccacttctcaccacgtgactggcagcgactcatcaacaactggggattccggcctaagcgactcaacttcaagctcttcaacattcaggtcaaagaggttacggacaacaatggagtcaagaccatcgccaataaccttaccagcacggtccaggccttcacggactcagactatcagctcccgtacgtgctcgggtcggctcacgagggctgcctcccgccgttcccagcggacgttttcatgattcctcagtacgggtatctgacgcttaatgatggaagccaggccgtgggtcgttcgtccttttactgcctggaatatttcccgtcgcaaatgctaagaacgggtaacaacttccagttcagctacgagtttgagaacgtacctttccatagcagctacgctcacagccaaagcctggaccgactaatgaatccactcatcgaccaatacttgtactatctctcaaagactattaacggttctggacagaatcaacaaacgctaaaattcagtgtggccggacccagcaacatggctgtccagggaagaaactacatacctggacccagctaccgacaacaacgtgtctcaaccactgtgactcaaaacaacaacagcgaatttgcttggcctggagcttcttcttgggctctcaatggacgtaatagcttgatgaatcctggacctgctatggccagccacaaagaaggagaggaccgtttctttcctttgtctggatctttaatttttggcaaacaaggaactggaagagacaacgtggatgcggacaaagtcatgataaccaacgaagaagaaattaaaactactaacccggtagcaacggagtcctatggacaagtggccacaaaccaccagagtgcccaagcacaggcgcagaccggctgggttcaaaaccaaggaatacttccgggtatggtttggcaggacagagatgtgtacctgcaaggacccatttgggccaaaattcctcacacggacggcaactttcacccttctccgctgatgggagggtttggaatgaagcacccgcctcctcagatcctcatcaaaaacacacctgtacctgcggatcctccaacggccttcaacaaggacgagctgaactctttcatcacccagtattctactggccaagtcagcgtggagatcgagtgggagctgcagaaggaaaacagcaagcgctggaacccggagatccagtacacttccaactattacaagtctaataatgttgaatttgctgttaatactgaaggtgtatatagtgaaccccgccccattggcaccagatacctgactcgtaatctg

SEQ ID NO: 627 - protein, 735 aa, Artificial Sequence
  Description of Artificial Sequence: Synthetic polypeptide
MAADGYLPDWLEDNLSEGIREWWALKPGAPQPKANQQHQDNARGLVLPGYKYLGPGNGLDKGEPVNAADAAALEHDKAYDQQLKAGDNPYLKYNHADAEFQERLKEDTSFGGNLGRAVFQAKKRLLEPLGLVEEAAKTAPGKKRPVEQSPQEPDSSAGIGKSGAQPAKKRLNFGQTGDTESVPDPQPIGEPPAAPSGVGSLTMASGGGAPVADNNEGADGVGSSSGNWHCDSQWLGDRVITTSTRTWALPTYNNHLYKQISNSTSGGSSNDNAYFGYSTPWRYFDFNRFHCHFSPRDWQRLINNWGFRPKRLNFKLFNIQVKEVTDNNGVKTIANNLTSTVQAFTDSDYQLPYVLGSAHEGCLPPFPADVFMIPQYGYLTLNDGSQAVGRSSFYCLEYFPSQMLRTGNNFQFSYEFENVPFHSSYAHSQSLDRLMNPLIDQYLYYLSKTINGSGQNQQTLKFSVAGPSNMAVQGRNYIPGPSYRQQRVSTTVTQNNNSEFAWPGASSWALNGRNSLMNPGPAMASHKEGEDRFFPLSGSLIFGKQGTGRDNVDADKVMITNEEEIKTTNPVATESYGQVATNHQSAQAQAQTGWVQNQGILPGMVWQDRDVYLQGPIWAKIPHTDGNFHPSPLMGGFGMKHPPPQILIKNTPVPADPPTAFNKDELNSFITQYSTGQVSVEIEWELQKENSKRWNPEIQYTSNYYKSNNVEFAVNTEGVYSEPRPIGTRYLTRNL

SEQ ID NO: 628 - DNA, 2205 bp, Artificial Sequence
  Description of Artificial Sequence: Synthetic polynucleotide
atggctgccgatggttatcttccagattggctcgaggacaaccttagtgaaggaattcgcgagtggtgggctttgaaacctggagcccctcaacccaaggcaaatcaacaacatcaagacaacgctcgaggtcttgtgcttccgggttacaaataccttggacccggcaacggactcgacaagggggagccggtcaacgcagcagacgcggcggccctcgagcacgacaaggcctacgaccagcagctcaaggccggagacaacccgtacctcaagtacaaccacgccgacgccgagttccaggagcggctcaaagaagatacgtcttttgggggcaacctcgggcgagcagtcttccaggacaaaaagaggcttcttgaacctcttggtctggttgaggaagcggctaagacggctcctggaaagaagaggcctgtagagcagtctcctcaggaaccggactcctccgcgggtattggcaaatcgggtgcacagcccgctaaaaagagactcaatttcggtcagactggcgacacagagtcagtcccagaccctcaaccaatcggagaacctcccgcagccccctcaggtgtgggatctcttacaatggcttcaggtggtggcgcaccagtggcagacaataacgaaggtgccgatggagtgggtagttcctcgggaaattggcattgcgattcccaatggctgggggacagagtcatcaccaccagcacccgaacctgggccctgcccacctacaacaatcacctctacaagcaaatctccaacagcacatctggaggatcttcaaatgacaacgcctacttcggctacagcaccccctgggggtattttgacttcaacagattccactgccacttctcaccacgtgactggcagcgactcatcaacaactggggattccggcctaagcgactcaacttcaagctcttcaacattcaggtcaaagaggttacggacaacaatggagtcaagaccatcgccaataaccttaccagcacggtccaggtcttcacggactcagactatcagctcccgtacgtgctcgggtcggctcacgagggctgcctcccgccgttcccagcggacgttttcatgattcctcagtacgggtatctgacgcttaatgatggaagccaggccgtgggtcgttcgtccttttactgcctggaatatttcccgtcgcaaatgctaagaacgggtaacaacttccaattcagctacgagtttgagaacgtacctttccatagcagctacgctcacagccaaagcctggaccgactaatgaatccactcatcgaccaatacttgtactatctctcaaagactattaacggttctggacagaatcaacaaacgctaaaattcagtgtggccggacccagcaacatggctgtccagggaagaaactacatacctggacccagctaccgacaacaacgtgtctcaaccactgtgactcaaaacaacaacagcgaatttgcttggcctggagcttcttcttgggctctcaatggacgtaatagcttgatgaatcctggacctgctatggccagccacaaagaaggagaggaccgtttctttcctttgtctggatctttaatttttggcaaacaaggaactggaagagacaacgtggatgcggacaaagtcatgataaccaacgaagaagaaattaaaactactaacccggtagcaacggagtcctatggacaagtggccacaaaccaccagagtgcccaagcacaggcgcagaccggctgggttcaaaaccaaggaatacttccgggtatggtttggcaggacagagatgtgtacctgcaaggacccatttgggccaaaattcctcacacggacggcaactttcacccttctccgctgatgggagggtttggaatgaagcacccgcctcctcagatcctcatcaaaaacacacctgtacctgcggatcctccaacggccttcaacaaggacaagctgaactctttcatcacccagtattctactggccaagtcagcgtggagatcgagtgggagctgcagaaggaaaacagcaagcgctggaacccggagatccagtacacttccaactattacaagtctaataatgttgaatttgctgttaatactgaaggtgtatatagtgaaccccgccccattggcaccagatacctgactcgtaatctg

SEQ ID NO: 629 - protein, 735 aa, Artificial Sequence
  Description of Artificial Sequence: Synthetic polypeptide
MAADGYLPDWLEDNLSEGIREWWALKPGAPQPKANQQHQDNARGLVLPGYKYLGPGNGLDKGEPVNAADAAALEHDKAYDQQLKAGDNPYLKYNHADAEFQERLKEDTSFGGNLGRAVFQDKKRLLEPLGLVEEAAKTAPGKKRPVEQSPQEPDSSAGIGKSGAQPAKKRLNFGQTGDTESVPDPQPIGEPPAAPSGVGSLTMASGGGAPVADNNEGADGVGSSSGNWHCDSQWLGDRVITTSTRTWALPTYNNHLYKQISNSTSGGSSNDNAYFGYSTPWGYFDFNRFHCHFSPRDWQRLINNWGFRPKRLNFKLFNIQVKEVTDNNGVKTIANNLTSTVQVFTDSDYQLPYVLGSAHEGCLPPFPADVFMIPQYGYLTLNDGSQAVGRSSFYCLEYFPSQMLRTGNNFQFSYEFENVPFHSSYAHSQSLDRLMNPLIDQYLYYLSKTINGSGQNQQTLKFSVAGPSNMAVQGRNYIPGPSYRQQRVSTTVTQNNNSEFAWPGASSWALNGRNSLMNPGPAMASHKEGEDRFFPLSGSLIFGKQGTGRDNVDADKVMITNEEEIKTTNPVATESYGQVATNHQSAQAQAQTGWVQNQGILPGMVWQDRDVYLQGPIWAKIPHTDGNFHPSPLMGGFGMKHPPPQILIKNTPVPADPPTAFNKDKLNSFITQYSTGQVSVEIEWELQKENSKRWNPEIQYTSNYYKSNNVEFAVNTEGVYSEPRPIGTRYLTRNL

SEQ ID NO: 630 - DNA, 2208 bp, Artificial Sequence
  Description of Artificial Sequence: Synthetic polynucleotide
atggctgccgatggttatcttccagattggctcgaggacaaccttagtgaaggaattcgcgagtggtgggctttgaaacctggagcccctcaacccaaggcaaatcaacaacatcaagacaacgctcgaggtcttgtgcttccgggttacaaataccttggacccggcaacggactcgacaagggggagccggtcaacgcagcagacgcggcggccctcgagcacgacaaggcctacgaccagcagctcaaggccggagacaacccgtacctcaagtacaaccacgccgacgccgagttccaggagcggctcaaagaagatacgtcttttgggggcaacctcgggcgagcagtcttccaggccaaaaagaggcttcttgaacctcttggtctggttgaggaagcggctaagacggctcctggaaagaagaggcctgtagagcagtctcctcaggaaccggactcctccgcgggtattggcaaatcgggtgcacagcccgctaaaaagagactcaatttcggtcagactggcgacacagagtcagtcccagaccctcaaccaatcggagaacctcccgcagccccctcaggtgtgggatctcttacaatggcttcaggtggtggcgcaccagtggcagacaataacgaaggtgccgatggagtgggtagttcctcgggaaattggcattgcgattcccaatggctgggggacagagccatcaccaccagcacccgaacctgggccctgcccacctacaacaatcacctctacaagcaaatctccaacagcacatctggaggatcttcaaatgacaacgcctacttcggctacagcaccccctgggggtattttgacttcaacagattccactgccacttctcaccacgtgactggcagcggctcatcaacaacaactggggattccggcctaagcgactcaacttcaagctcttcaacattcaggtcaaagaggttacggacaacaatggagtcaagaccatcgccaataaccttaccagcacggtccaggtcttcacggactcagactatcagctcccgtacgtgctcgggtcggctcacgagggctgcctcccgccgttcccagcggacgttttcatgattcctcagtacgggtatctgacgcttaatgatggaagccaggccgtgggtcgttcgtccttttactgcctggaatatttcccgtcgcaaatgctaagaacgggtaacaacttccagttcagctacgagtttgagaacgtacctttccatagcagctacgctcacagccaaagcctggaccgactaatgaatccactcatcgaccaatacttgtactatctctcaaagactattaacggttctggacagaatcaacaaacgctaaaattcagtgtggccggacccagcaacatggctgtccagggaagaaactacatacctggacccagctaccgacaacaacgtgtctcaaccactgtgactcaaaacaacaacagcgaatttgcttggcctggagcttcttcttgggctctcaatggacgtaatagcttgatgaatcctggacctgctatggccagccacaaagaaggagaggaccgtttctttcctttgtctggatctttaatttttggcaaacaaggaactggaagagacaacgtggatgcggacaaagtcatgacaaccaacgaagaagaaattaaaactactaacccggtagcaacggagtcctatggacaagtggccacaaaccaccagagtgcccaagcacaggcgcagaccggctgggttcaaaaccaaggaatacttccgggtatggtttggcaggacagagatgtgtacctgcaaggacccatttgggccaaaattcctcacacggacggcaactttcacccttctccgctgatgggagggtttggaatgaagcacccgcctcctcagatcctcatcaaaaacacacctgtacctgcggatcctccaacggccttcaacaaggacaagctgaactctttcatcacccagtattctactggccaagtcagcgtggagatcgagtgggagctgcagaaggaaaacagcaagcgctggaacccggagatccagtacacttccaactattacaagtctaataatgttgaatttgctgttaatactgaaggtgtatatagtgaaccccgccccattggcaccagatacctgactcgtaatctg

SEQ ID NO: 631 - protein, 736 aa, Artificial Sequence
  Description of Artificial Sequence: Synthetic polypeptide
MAADGYLPDWLEDNLSEGIREWWALKPGAPQPKANQQHQDNARGLVLPGYKYLGPGNGLDKGEPVNAADAAALEHDKAYDQQLKAGDNPYLKYNHADAEFQERLKEDTSFGGNLGRAVFQAKKRLLEPLGLVEEAAKTAPGKKRPVEQSPQEPDSSAGIGKSGAQPAKKRLNFGQTGDTESVPDPQPIGEPPAAPSGVGSLTMASGGGAPVADNNEGADGVGSSSGNWHCDSQWLGDRAITTSTRTWALPTYNNHLYKQISNSTSGGSSNDNAYFGYSTPWGYFDFNRFHCHFSPRDWQRLINNNWGFRPKRLNFKLFNIQVKEVTDNNGVKTIANNLTSTVQVFTDSDYQLPYVLGSAHEGCLPPFPADVFMIPQYGYLTLNDGSQAVGRSSFYCLEYFPSQMLRTGNNFQFSYEFENVPFHSSYAHSQSLDRLMNPLIDQYLYYLSKTINGSGQNQQTLKFSVAGPSNMAVQGRNYIPGPSYRQQRVSTTVTQNNNSEFAWPGASSWALNGRNSLMNPGPAMASHKEGEDRFFPLSGSLIFGKQGTGRDNVDADKVMTTNEEEIKTTNPVATESYGQVATNHQSAQAQAQTGWVQNQGILPGMVWQDRDVYLQGPIWAKIPHTDGNFHPSPLMGGFGMKHPPPQILIKNTPVPADPPTAFNKDKLNSFITQYSTGQVSVEIEWELQKENSKRWNPEIQYTSNYYKSNNVEFAVNTEGVYSEPRPIGTRYLTRNL

SEQ ID NO: 632 - DNA, 2205 bp, Artificial Sequence
  Description of Artificial Sequence: Synthetic polynucleotide
atggctgccgatggttatcttccagattggctcgaggacactctctctgaaggaataagacagtggtggaagctcaaacctggcccaccaccaccaaagcccgcagagcggcataaggacgacagcaggggtcttgtgcttcctgggtacaagtacctcggacccttcaacggactcgacaagggagagccggtcaacgaggcagacgccgcggccctcgagcacgacaaagcctacgaccggcagctcgacagcggagacaacccgtacctcaagtacaaccacgccgacgcggagtttcaggagcgccttaaagaagatacgtcttttgggggcaacctcggacgagcagtcttccaggcgaaaaagagggttcttgaacctctgggcctggttgaggaacctgttaagacggctccgggaaaaaagaggccggtagagcactctcctgtggagccagactcctcctcgggaaccggaaaggcgggccagcagcctgcaagaaaaagattgaattttggtcagactggagacgcagactcagtacctgacccccagcctctcggacagccaccagcagccccctctggtctgggaactaatacgatggctacaggcagtggcgcaccaatggcagacaataacgagggcgccgacggagtgggtaattcctcgggaaattggcattgcgattccacatggatgggcgacagagtcatcaccaccagcacccgaacctgggccctgcccacctacaacaaccacctctacaaacaaatttccagccaatcaggagcctcgaacgacaatcactactttggctacagcaccccttgggggtattttgacttcaacagattccactgccacttttcaccacgtgactggcaaagactcatcaacaacaactggggattccgacccaagagactcaacttcaagctctttaacattcaagtcaaagaggtcacgcagaatgacggtacgacgacgattgccaataaccttaccagcacggttcaggtgtttactgactcggagtaccagctcccgtacgtcctcggctcggcgcatcaaggatgcctcccgccgttcccagcagacgtcttcatggtgccacagtatggatacctcaccctgaacaacgggagtcaggcagtaggacgctcttcattttactgcctggagtactttccttctcagatgctgcgtaccggaaacaactttaccttcagctacacttttgaggacgttcctttccacagcagctacgctcacagccagagtctggaccgtctcatgaatcctctcatcgaccagtacctgtattacttgagcagaacaaacactccaagtggaaccaccacgcagtcaaggcttcagttttctcgggccggagcgagtgacattcgggaccagtctaggaactggcttcctggaccctgttaccgccagcagcgagtatcaaagacatctgcggataacaacaacagtgaatactcgtggactggagctaccaagtaccacctcaatggcagagactctctggtgaatccgggcccggccatggcaagccacaaggacgatgaagaaaagttttttcctcagagcggggttctcatctttgggaagcaaggctcagagaaaacaaatgtggacattgaaaaggtcatgattacagacgaagaggaaatcaggacaaccaatcccgtggctacggagcagtatggttctgtatctaccaacctccagagaggcaacagacaagcagctaccgcagatgtcaacacacaaggcgttcttccaggcatggtctggcaggacagagatgtgtaccttcaggggcccatctgggcaaagattccacacacggacggacattttcacccctctcccctcatgggtggattcggacttaaacaccctcctccacagattctcatcaagaacaccccggtacctgcgaatccttcgaccaccttcagtgcggcaaagtttgcttccttcatcacacagtactccacgggacaggtcagcgtggagatcgagtgggagctgcagaaggaaaacagcaaacgctggaatcccgaaattcagtacacttccaactacaacaagtctgttaatgtggactttactgtggacactaatggcgtgtattcagagcctcgccccattggcaccagatacctgactcgtaatctg

SEQ ID NO: 633 - protein, 735 aa, Artificial Sequence
  Description of Artificial Sequence: Synthetic polypeptide
MAADGYLPDWLEDTLSEGIRQWWKLKPGPPPPKPAERHKDDSRGLVLPGYKYLGPFNGLDKGEPVNEADAAALEHDKAYDRQLDSGDNPYLKYNHADAEFQERLKEDTSFGGNLGRAVFQAKKRVLEPLGLVEEPVKTAPGKKRPVEHSPVEPDSSSGTGKAGQQPARKRLNFGQTGDADSVPDPQPLGQPPAAPSGLGTNTMATGSGAPMADNNEGADGVGNSSGNWHCDSTWMGDRVITTSTRTWALPTYNNHLYKQISSQSGASNDNHYFGYSTPWGYFDFNRFHCHFSPRDWQRLINNNWGFRPKRLNFKLFNIQVKEVTQNDGTTTIANNLTSTVQVFTDSEYQLPYVLGSAHQGCLPPFPADVFMVPQYGYLTLNNGSQAVGRSSFYCLEYFPSQMLRTGNNFTFSYTFEDVPFHSSYAHSQSLDRLMNPLIDQYLYYLSRTNTPSGTTTQSRLQFSRAGASDIRDQSRNWLPGPCYRQQRVSKTSADNNNSEYSWTGATKYHLNGRDSLVNPGPAMASHKDDEEKFFPQSGVLIFGKQGSEKTNVDIEKVMITDEEEIRTTNPVATEQYGSVSTNLQRGNRQAATADVNTQGVLPGMVWQDRDVYLQGPIWAKIPHTDGHFHPSPLMGGFGLKHPPPQILIKNTPVPANPSTTFSAAKFASFITQYSTGQVSVEIEWELQKENSKRWNPEIQYTSNYNKSVNVDFTVDTNGVYSEPRPIGTRYLTRNL

SEQ ID NO: 634 - DNA, 2208 bp, Artificial Sequence
  Description of Artificial Sequence: Synthetic polynucleotide
atggctgccgatggttatcttccagattggctcgaggacaacctctctgagggcattcgcgagtggtgggacttgaaacctggagccccgaagcccaaagccaaccagcaaaagcaggacgacggccggggtctggtgcttcctggctacaagtacctcggacccttcaacggactcgacaagggggagcccgtcaacgcggcggacgcagcggccctcgagcacgacaaggcctacgaccagcagctcaaagcgggtgacaatccgtacctgcggtataaccacgccgacgccgagtttcaggagcgtctgcaagaagatacgtcttttgggggcaacctcgggcgagcagtcttccaggccaagaagcgggttctcgaacctctcggtctggttgaggaaggcgctaagacggctcctggaaagaaacgtccggtagagcagtcgccacaagagccagactcctcctcgggcatcggcaagacaggccagcagcccgctaaaaagagactcaattttggtcagactggcgactcagagtcagtccccgatccacaacctctcggagaacctccagcaacccccgctgctgtggggcctactacaatggcttcaggcggtggcgcaccaatggcagacaataacgaaggcgtcgacggagtgggtaatgcctcaggaaattggcattgcgattccacatggctgggcgacagagtcatcaccaccagcacccgcacctgggccttgcccacctacaataaccacctctacaagcaaatctccagtgcttcaacgggggccagcaacgacaaccactacttcggctacagcaccccctgggggtattttgatttcaacagattccactgccacttttcaccacgtgactggcagcgactcatcaacaacaattggggattccggcccaagagactcaacttcaaactcttcaacatccaagtcaaggaggtcacgacgaatgatggcgttacaaccatcgctaataaccttaccagcacggttcaagtcttctcggactcggagtaccagcttccgtacgtcctcggctctgcgcaccagggctgcctccctccgttcccggcggacgtgttcatgattccgcaatacggctacctgacgctcaacaatggcagccaagccgtgggacgttcatccttttactgcctggaatatttcccttctcagatgctgagaacgggcaacaactttaccttcagctacacctttgaggaagtgcctttccacagcagctacgcgcacagccagagcctggaccggctgatgaatcctctcatcgaccaatacctgtattacctgaacagaactcaaaatcagtccggaagtgcccaaaacaaggacttgctgtttagccgtgggtctccagctggcatgtctgttcagcccaaaaactggctacctggaccctgttatcggcagcagcgcgtttctaaaacaaaaacagacaacaacaacagcaattttacctggactggtgcttcaaaatataacctcaatgggcgtgaatccatcatcaaccctggcactgctatggcctcacacaaagacgacgaagacaagttctttcccatgagcggtgtcatgatttttggaaaagagagcgccggagcttcaaacactgcattggacaatgtcatgattacagacgaagaggaaattaaagccactaaccctgtggccaccgaaagatttgggaccgtggcagtcaatttccagagcagcagcacagaccctgcgaccggagatgtgcatgctatgggagcattacctggcatggtgtggcaagatagagacgtgtacctgcagggtcccatttgggccaaaattcctcacacagatggacactttcacccgtctcctcttatgggcggctttggactcaagaacccgcctcctcagatcctcatcaaaaacacgcctgttcctgcgaatcctccggcggagttttcagccacaaagcttgcttcattcatcacccaatactccacaggacaagtgagtgtggaaattgaatgggagctgcagaaagaaaacagcaagcgctggaatcccgaagtgcagtacacatccaattatgcaaaatctgccaacgttgattttactgtggacaacaatggactttatactgagcctcgccccattggcacccgttaccttacccgtcccctg

SEQ ID NO: 635 - protein, 736 aa, Artificial Sequence
  Description of Artificial Sequence: Synthetic polypeptide
MAADGYLPDWLEDNLSEGIREWWDLKPGAPKPKANQQKQDDGRGLVLPGYKYLGPFNGLDKGEPVNAADAAALEHDKAYDQQLKAGDNPYLRYNHADAEFQERLQEDTSFGGNLGRAVFQAKKRVLEPLGLVEEGAKTAPGKKRPVEQSPQEPDSSSGIGKTGQQPAKKRLNFGQTGDSESVPDPQPLGEPPATPAAVGPTTMASGGGAPMADNNEGVDGVGNASGNWHCDSTWLGDRVITTSTRTWALPTYNNHLYKQISSASTGASNDNHYFGYSTPWGYFDFNRFHCHFSPRDWQRLINNNWGFRPKRLNFKLFNIQVKEVTTNDGVTTIANNLTSTVQVFSDSEYQLPYVLGSAHQGCLPPFPADVFMIPQYGYLTLNNGSQAVGRSSFYCLEYFPSQMLRTGNNFTFSYTFEEVPFHSSYAHSQSLDRLMNPLIDQYLYYLNRTQNQSGSAQNKDLLFSRGSPAGMSVQPKNWLPGPCYRQQRVSKTKTDNNNSNFTWTGASKYNLNGRESIINPGTAMASHKDDEDKFFPMSGVMIFGKESAGASNTALDNVMITDEEEIKATNPVATERFGTVAVNFQSSSTDPATGDVHAMGALPGMVWQDRDVYLQGPIWAKIPHTDGHFHPSPLMGGFGLKNPPPQILIKNTPVPANPPAEFSATKLASFITQYSTGQVSVEIEWELQKENSKRWNPEVQYTSNYAKSANVDFTVDNNGLYTEPRPIGTRYLTRPL

SEQ ID NO: 636 - DNA, 2208 bp, Artificial Sequence
  Description of Artificial Sequence: Synthetic polynucleotide
atggctgccgatggttatcttccagattggctcgaggacaacctctctgagggcattcgcgagtggtgggacttgaaacctggagccccgaagcccaaagccaaccagcaaaagcaggacgacggccggggtctggtgcttcctggctacaagtacctcggacccttcaacggactcgacaagggggagcccgtcaacgcggcggacgcagcggccctcgagcacgacaaggcctacgaccagcagctcaaagcgggtgacaatccgtacctgcggtataaccacgccgacgccgagtttcaggagcgtctgcaagaagatacgtcttttgggggcaacctcgggcgagcagtcttccaggccaagaagcgggttctcgaacctctcggtctggttgaggaaggcgctaagacggctcctggaaagagacgtccggtagagcagtcgccacaagagccagactcctcctcgggcatcggcaagacaggccagcagcccgctaaaaagagactcaattttggtcagactggcgactcagagtcagtccccgatccacaacctctcggagaacctccagcaacccccgctgctgtgggacctactacaatggcttcaggcggtggcgcaccaatggcagacaataacgaaggcgccgacggagtgggtaatgcctcaggaaattggcattgcgattccacatggctgggcgacagagtcatcaccaccagcacccgcacctgggccttgcccacctacaataaccacctctacaagcaaatctccagtgcttcaacgggggccagcaacgacaaccactacttcggctacagcaccccctgggggtattttgatttcaacagattccactgccacttttcaccacgtgactggcagcgactcatcaacaacaattggggattccggcccaagagactcaacttcaaactcttcaacatccaagtcaaggaggtcacgacgaatgatggcgtcacaaccatcgctaataaccttaccagcacggttcaagtcttctcggactcggagtaccagcttccgtacgtcctcggctctgcgcaccagggctgcctccctccgttcccggcggacgtgttcatgattccgcaatacggctacctgacgctcaacaatggcagccaagccgtgggacgttcatccttttactgcctggaatatttcccttctcagatgctgagaacgggcaacaactttaccttcagctacacctttgaggaagtgcctttccacagcagctacgcgcacagccagagcctggaccggctgatgaatcctctcatcgaccaatacctgtattacctgaacagaactcaaaatcagtccggaagtgcccaaaacaaggacttgctgtttagccgtgggtctccagctggcatgtctgttcagcccaaaaactggctacctggaccctgttatcggcagcagcgcgtttctaaaacaaaaacagacaacaacaacagcaattttacctggactggtgcttcaaaatataacctcaatgggcgtgaatccatcatcaaccctggcactgctatggcctcacacaaagacgacgaagacaagttctttcccatgagcggtgtcatgatttttggaaaagagagcgccggagcttcaaacactgcattggacaatgtcatgattacagacgaagaggaaattaaagccactaaccctgtggccaccgaaagatttgggaccgtggcagtcaatttccagagcagcagcacagaccctgcgaccggagatgtgcatgctatgggagcattacctggcatggtgtggcaagatagagacgtgtacctgcagggtcccatttgggccaaaattcctcacacagatggacactttcacccgtctcctcttatgggcggctttggactcaagaacccgcctcctcagatcctcatcaaaaacacgcctgttcctgcgaatcctccggcggagttttcagctacaaagtttgcttcgttcatcacccaatactccacaggacaagtgagtgtggaaattgaatgggagctgcagaaagaaaacagcaagcgctggaatcccgaagtgcagtacacatccaattatgcaaaatctgccaacgttgattttactgtggacaacaatggactttatactgagcctcgccccattggcacccgttaccttacccgtcccctg

SEQ ID NO: 637 - protein, 736 aa, Artificial Sequence
  Description of Artificial Sequence: Synthetic polypeptide
MAADGYLPDWLEDNLSEGIREWWDLKPGAPKPKANQQKQDDGRGLVLPGYKYLGPFNGLDKGEPVNAADAAALEHDKAYDQQLKAGDNPYLRYNHADAEFQERLQEDTSFGGNLGRAVFQAKKRVLEPLGLVEEGAKTAPGKRRPVEQSPQEPDSSSGIGKTGQQPAKKRLNFGQTGDSESVPDPQPLGEPPATPAAVGPTTMASGGGAPMADNNEGADGVGNASGNWHCDSTWLGDRVITTSTRTWALPTYNNHLYKQISSASTGASNDNHYFGYSTPWGYFDFNRFHCHFSPRDWQRLINNNWGFRPKRLNFKLFNIQVKEVTTNDGVTTIANNLTSTVQVFSDSEYQLPYVLGSAHQGCLPPFPADVFMIPQYGYLTLNNGSQAVGRSSFYCLEYFPSQMLRTGNNFTFSYTFEEVPFHSSYAHSQSLDRLMNPLIDQYLYYLNRTQNQSGSAQNKDLLFSRGSPAGMSVQPKNWLPGPCYRQQRVSKTKTDNNNSNFTWTGASKYNLNGRESIINPGTAMASHKDDEDKFFPMSGVMIFGKESAGASNTALDNVMITDEEEIKATNPVATERFGTVAVNFQSSSTDPATGDVHAMGALPGMVWQDRDVYLQGPIWAKIPHTDGHFHPSPLMGGFGLKNPPPQILIKNTPVPANPPAEFSATKFASFITQYSTGQVSVEIEWELQKENSKRWNPEVQYTSNYAKSANVDFTVDNNGLYTEPRPIGTRYLTRPL

SEQ ID NO: 638 - DNA, 2175 bp, Artificial Sequence
  Description of Artificial Sequence: Synthetic polynucleotide
atgtcttttgttgatcaccctccagattggttggaagaagttggtgaaggtcttcgcgagtttttgggccttgaagcgggcccaccgaaaccaaaacccaatcagcagcatcaagatcaagcccgtggtcttgtgctgcctggttataactatctcggacccggaaacggtctcgatcgaggagagcctgtcaacagggcagacgaggtcgcgcgagagcacgacatctcgtacaacgagcagcttgaggcgggagacaacccctacctcaagtacaaccacgcggacgccgagtttcaggagaagctcgccgacgacacatccttcgggggaaacctcggaaaggcagtctttcaggccaagaaaagggttctcgaaccttttggcctggttgaagagggtgctaagacggcccctaccggaaagcggatagacgaccactttccaaaaagaaagaaggcccggaccgaagaggactccaagccttccacctcgtcagacgccgaagctggacccagcggatcccagcagctgcaaatcccagcccaaccagcctcaagtttgggagctgatacaatgtctgcgggaggtggcggcccattgggcgacaataaccaaggtgccgatggagtgggcaatgcctcgggagattggcattgcgattccacgtggatgggggacagagtcgtcaccaagtccacccgaacctgggtgctgcccagctacaacaaccaccagtaccgagagatcaaaagcggctccgtcgacggaagcaacgccaacgcctactttggatacagcaccccctgggggtactttgactttaaccgcttccacagccactggagcccccgagactggcaaagactcatcaacaactactggggcttcagaccccggtccctcagagtcaaaatcttcaacattcaagtcaaagaggtcacggtgcaggactccaccaccaccatcgccaacaacctcacctccaccgtccaagtgtttacggacgacgactaccagctgccctacgtcgtcggcaacgggaccgagggatgcctgccggccttccctccgcaggtctttacgctgccgcagtacggttacgcgacgctgaaccgcgacaacacagaaaatcccaccgagaggagcagcttcttctgcctagagtactttcccagcaagatgctgagaacgggcaacaactttgagtttacctacaactttgaggaggtgcccttccactccagcttcgctcccagtcagaacctcttcaagctggccaacccgctggtggaccagtacttgtaccgcttcgtgagcacaaataacactggcggagtccagttcaacaagaacctggccgggagatacgccaacacctacaaaaactggttcccggggcccatgggccgaacccagggctggaacctgggctccggggtcaaccgcgccagtgtcagcgccttcgccgcgaccaataggatggagctcgagggcgcgagttaccaggtgcccccgcagccgaacggcatgaccaacaacctccagggcagcaacacctatgccctggagaacactatgatcttcaacagccagccggcgaacccgggcaccaccgccacgtacctcgagggcaacatgctcatcaccagcgagagcgagacgcagccggtgaaccgcgtggcgtacaacgtcggcgggcagatggccaccaacaaccagagctccaccactgcccccgcgaccggcacgtacaacctccaggaaatcgtgcccggcggcgtgtggatggagagggacgtgtacctccaaggacccatctgggccaagatcccagagacgggggcgcactttcacccctctccggccatgggcggattcggactcaaacacccaccgcccatgatgctcatcaagaacacgcctgtgcccggaaataccaccagcttctcggacgtgcccgtcagcagcttcatcacccagtacagcaccgggcaggtcaccgtggagatggagtgggagctcaagaaggaaaactccaagaggtggaacccagagatccagtacacaaacaactacaacgacccccagtttgtggactttgccccggacagcaccggggaatacagaaccaccagacctatcggaacccgataccttacccgacccctttaa

SEQ ID NO: 639 - protein, 724 aa, Artificial Sequence
  Description of Artificial Sequence: Synthetic polypeptide
MSFVDHPPDWLEEVGEGLREFLGLEAGPPKPKPNQQHQDQARGLVLPGYNYLGPGNGLDRGEPVNRADEVAREHDISYNEQLEAGDNPYLKYNHADAEFQEKLADDTSFGGNLGKAVFQAKKRVLEPFGLVEEGAKTAPTGKRIDDHFPKRKKARTEEDSKPSTSSDAEAGPSGSQQLQIPAQPASSLGADTMSAGGGGPLGDNNQGADGVGNASGDWHCDSTWMGDRVVTKSTRTWVLPSYNNHQYREIKSGSVDGSNANAYFGYSTPWGYFDFNRFHSHWSPRDWQRLINNYWGFRPRSLRVKIFNIQVKEVTVQDSTTTIANNLTSTVQVFTDDDYQLPYVVGNGTEGCLPAFPPQVFTLPQYGYATLNRDNTENPTERSSFFCLEYFPSKMLRTGNNFEFTYNFEEVPFHSSFAPSQNLFKLANPLVDQYLYRFVSTNNTGGVQFNKNLAGRYANTYKNWFPGPMGRTQGWNLGSGVNRASVSAFAATNRMELEGASYQVPPQPNGMTNNLQGSNTYALENTMIFNSQPANPGTTATYLEGNMLITSESETQPVNRVAYNVGGQMATNNQSSTTAPATGTYNLQEIVPGGVWMERDVYLQGPIWAKIPETGAHFHPSPAMGGFGLKHPPPMMLIKNTPVPGNTTSFSDVPVSSFITQYSTGQVTVEMEWELKKENSKRWNPEIQYTNNYNDPQFVDFAPDSTGEYRTTRPIGTRYLTRPL

SEQ ID NO: 640 - DNA, 2175 bp, Artificial Sequence
  Description of Artificial Sequence: Synthetic polynucleotide
atgtcttttgttgatcaccctccagattggttggaagaagttggtgaaggtcttcgcgagtttttgggccttgaagcgggcccaccgaaaccaaaacccaatcagcagcatcaagatcaagcccgtggtcttgtgctgcctggttataactatctcggacccggaaacggtctcgatcgaggagagcctgtcaacagggcagacgaggtcgcgcgagagcacgacatctcgtacaacgagcagcttgaggcgggagacaacccctacctcaagtacaaccacgcggacgccgagtttcaggagaagctcgccgacgacacatccttcgggggaaacctcggaaaggtagtctttcaggccaagaaaagggttctcgaaccttttggcctggttgaagagggtgctaagacggcccctaccggaaagcggatagacgaccactttccaaaaagaaagaaggcccggaccgaagaggactccaagccttccacctcgtcagacgccgaagctggacccagcggatcccagcagctgcaaatcccagcccaaccagcctcaagtttgggagctgatacaatgtctgcgggaggtggcggcccattgggcggcaataaccaaggtgccgatggagtgggcaatgcctcgggagattggcattgcgattccacgtggatgggggacagagtcgtcaccaagtccacccgaacctgggtgctgcccagctacaacaaccaccagtaccgagagatcaaaagcggctccgtcgacggaagcaacgccaacgcctactttggatacagcaccccctgggggtactttgactttaaccgcttccacagccactggggcccccgagactggcaaagactcatcaacaactactggggcttcagaccccggtccctcagagtcaaaatcttcaacattcaagtcaaagaggtcacggtgcaggactccaccaccaccatcgccaacaacctcacctccaccgtccaagtgtttacggacgacgactaccagctgccctacgtcgtcggcaacgggaccgagggatgcctgccggccttccctccgcaggtctttacgctgccgcagtacggttacgcgacgctgaaccgcgacaacacagaaaatcccaccgagaggagcagcttcttctgcctagagtactttcccagcaagatgctgagaacgggcaacaactttgagtttacctacaactttgaggaggtgcccttccactccagcttcgctcccagtcagaacctcttcaagctggccaacccgctggtggaccagtacttgtaccgcttcgtgagcacaaataacactggcggagtccagttcaacaagaacctggccgggagatacgccaacacctacaaaaactggttcccggggcccatgggccgaacccagggctggaacctgggctccggggtcaaccgcgccagtgtcagcgccctcgccacgaccaataggatggagctcgagggcgcgagttaccaggtgcccccgcagccgaacggcatgaccaacaacctccagggcagcaacacctatgccctggagaacactatgatcttcaacagccagccggcgaacccgggcaccaccgccacgtacctcgagggcaacatgctcatcaccagcgagagcgagacgcagccggtgaaccgcgtggcgtacaacgtcggcgggcagatggccaccaacaaccagagctccaccactgcccccgcgaccggcacgtacaacctccaggaaatcgtgcccggcagcgtgtggatggagagggacgtgtacctccaaggacccatctgggccaagatcccagagacgggggcgcactttcacccctctccggccatgggcggattcggactcaaacacccaccgcccatgatgctcatcaagaacacgcctgtgcccggaaatatcaccagcttctcggacgtgcccgtcagcagcttcatcacccagtacagcaccgggcaggtcaccgtggagatggagtgggagctcaagaaggaaaactccaagaggtggaacccagagatccagtacacaaacaactacaacgacccccagtttgtggactttgccccggacagcaccggggaatacagaaccaccagacctatcggaacccgataccttacccgacccctttaa

SEQ ID NO: 641 - protein, 724 aa, Artificial Sequence
  Description of Artificial Sequence: Synthetic polypeptide
MSFVDHPPDWLEEVGEGLREFLGLEAGPPKPKPNQQHQDQARGLVLPGYNYLGPGNGLDRGEPVNRADEVAREHDISYNEQLEAGDNPYLKYNHADAEFQEKLADDTSFGGNLGKVVFQAKKRVLEPFGLVEEGAKTAPTGKRIDDHFPKRKKARTEEDSKPSTSSDAEAGPSGSQQLQIPAQPASSLGADTMSAGGGGPLGGNNQGADGVGNASGDWHCDSTWMGDRVVTKSTRTWVLPSYNNHQYREIKSGSVDGSNANAYFGYSTPWGYFDFNRFHSHWGPRDWQRLINNYWGFRPRSLRVKIFNIQVKEVTVQDSTTTIANNLTSTVQVFTDDDYQLPYVVGNGTEGCLPAFPPQVFTLPQYGYATLNRDNTENPTERSSFFCLEYFPSKMLRTGNNFEFTYNFEEVPFHSSFAPSQNLFKLANPLVDQYLYRFVSTNNTGGVQFNKNLAGRYANTYKNWFPGPMGRTQGWNLGSGVNRASVSALATTNRMELEGASYQVPPQPNGMTNNLQGSNTYALENTMIFNSQPANPGTTATYLEGNMLITSESETQPVNRVAYNVGGQMATNNQSSTTAPATGTYNLQEIVPGSVWMERDVYLQGPIWAKIPETGAHFHPSPAMGGFGLKHPPPMMLIKNTPVPGNITSFSDVPVSSFITQYSTGQVTVEMEWELKKENSKRWNPEIQYTNNYNDPQFVDFAPDSTGEYRTTRPIGTRYLTRPL

SEQ ID NO: 642 - DNA, 2175 bp, Artificial Sequence
  Description of Artificial Sequence: Synthetic polynucleotide
atgtcttttgttgatcaccctccagattggttggaagaagttggtgaaggtcttcgcgagtttttgggccttgaagcgggcccaccgaaaccaaaacccaatcagcagcatcaagatcaagcccgtggtcttgtgctgcctggttataactatctcggacccggaaacggtctcgatcgaggagagcctgtcaacagggcagacgaggtcgcgcgagagcacgacatctcgtacaacgagcagcttgaggcgggagacaacccctacctcaagtacaaccacgcggacgccgagtttcaggagaagctcgccgacgacacatccttcgggggaaacctcggaaaggcagtctttcaggccaagaaaagggttctcgaaccttttggcctggttgaagagggtgctaagacggcccctaccggaaagcggatagacgaccactttccaaaaagaaagaaggcccggaccgaagaggactccaagccttccacctcgtcagacgccgaagctggacccagcggatcccagcagctgcaaatcccagcccaaccagcctcaagtttgggagctgatacaatgtctgcgggaggtggcggcccattgggcgacaataaccaaggtgccgatggagtgggcaatgcctcgggagattggcattgcgattccacgtggatgggggacagagtcgtcaccaagtccacccgaacctgggtgctgcccagctacaacaaccaccagtaccgagagatcaaaagcggctccgtcgacggaagcaacgccaacgcctactttggatacagcaccccctgggggtactttgactttaaccgcttccacagccactggagcccccgagactggcaaagactcatcaacaactactggggcttcagaccccggtccctcagagtcaaaatcttcaacattcaagtcaaagaggtcacggtgcaggactccaccaccaccatcgccaacaacctcacctccaccgtccaagtgtttacggacgacgactaccagctgccctacgtcgtcggcaacgggaccgagggatgcctgccggccttccctccgcaggtctttacgctgccgcagtacggttacgcgacgctgaaccgcgacaacacagaaaatcccaccgagaggagcagcttcttctgcctagagtactttcccagcaagatgctgagaacgggcaacaactttgagtttacctacaactttgaggaggtgcccttccactccagcttcgctcccagtcagaacctcttcaagctggccaacccgctggtggaccagtacttgtaccgcttcgtgagcacaaataacactggcggagtccagttcaacaagaacctggccgggagatacgccaacacctacaaaaactggttcccggggcccatgggccgaacccagggctggaacctgggctccggggtcaaccgcgccagtgtcagcgccttcgccacgaccaataggatggagctcgagggcgcgagttaccaggtgcccccgcagccgaacggcatgaccaacaacctccagggcagcaacacctatgccctggagaacactatgatcttcaacagccagccggcgaacccgggcaccaccgccacgtacctcgagggcaacatgctcatcaccagcgagagcgagacgcagccggtgaaccgcgtggcgtacaacgtcggcgggcagatggccaccaacaaccagagctccaccactgcccccgcgaccggcacgtacaacctccaggaaatcgtgcccggcagcgtgtggatggagagggacgtgtacctccaaggacccatctgagccaagatcccagagacgggggcgcactttcacccctctccggccatgggcggattcggactcaaacacccaccgcccatgatgctcatcaagaacacgcctgtgcccggaaatatcaccagcttctcggacgtgcccgtcagcagcttcatcacccagtacagcaccgggcaggtcaccgtggagatggagtgggagctcaagaaggaaaactccaagaggtggaacccagagatccagtacacaaacaactacaacgacccccagtttgtggactttgccccggacagcaccggggaatgcagaaccaccagacctatcggaacccgataccttacccgacccctttaa

SEQ ID NO: 643 - protein, 723 aa, Artificial Sequence
  Description of Artificial Sequence: Synthetic polypeptide
MSFVDHPPDWLEEVGEGLREFLGLEAGPPKPKPNQQHQDQARGLVLPGYNYLGPGNGLDRGEPVNRADEVAREHDISYNEQLEAGDNPYLKYNHADAEFQEKLADDTSFGGNLGKAVFQAKKRVLEPFGLVEEGAKTAPTGKRIDDHFPKRKKARTEEDSKPSTSSDAEAGPSGSQQLQIPAQPASSLGADTMSAGGGGPLGDNNQGADGVGNASGDWHCDSTWMGDRVVTKSTRTWVLPSYNNHQYREIKSGSVDGSNANAYFGYSTPWGYFDFNRFHSHWSPRDWQRLINNYWGFRPRSLRVKIFNIQVKEVTVQDSTTTIANNLTSTVQVFTDDDYQLPYVVGNGTEGCLPAFPPQVFTLPQYGYATLNRDNTENPTERSSFFCLEYFPSKMLRTGNNFEFTYNFEEVPFHSSFAPSQNLFKLANPLVDQYLYRFVSTNNTGGVQFNKNLAGRYANTYKNWFPGPMGRTQGWNLGSGVNRASVSAFATTNRMELEGASYQVPPQPNGMTNNLQGSNTYALENTMIFNSQPANPGTTATYLEGNMLITSESETQPVNRVAYNVGGQMATNNQSSTTAPATGTYNLQEIVPGSVWMERDVYLQGPIAKIPETGAHFHPSPAMGGFGLKHPPPMMLIKNTPVPGNITSFSDVPVSSFITQYSTGQVTVEMEWELKKENSKRWNPEIQYTNNYNDPQFVDFAPDSTGECRTTRPIGTRYLTRPL

SEQ ID NO: 644 - DNA, 2175 bp, Artificial Sequence
  Description of Artificial Sequence: Synthetic polynucleotide
atgtcttttgttgatcaccctccagattggttggaagaagttggtgaaggtcttcgcgagtttttgggccttgaagcgggcccaccgaaaccaaaacccaatcagcagcatcaagatcaagcccgtggtcttgtgctgcctggttataactatctcggacccggaaacggtctcgatcgaggagagcctgtcaacagggcagacgaggtcgcgcgagagcacgacatctcgtacaacgagcagcttgaggcgggagacaacccctacctcaagtacaaccacgcggacgccgagtttcaggagaagctcgccgacgacacatccttcgggggaaacctcggaaaggcagtctttcaggccaagaaaagggttctcgaaccttttggcctggttgaagagggtgctaagacggcccctaccggaaagcggatagacgaccactttccaaaaagaaagaaggcccggaccgaagaggactccaagccttccacctcgtcagacgccgaagctggacccagcggatcccagcagctgcaaatcccagcccaaccagcctcaagtttgggagctgatacaatgtctgcgggaggtggcggcccattgggcgacaataaccaaggtgccgatggagtgggcaatgcctcgggagattggcattgcgattccacgtggatgggggacagagtcgtcaccaagtccacccgaacctgggtgctgcccagctacaacaaccaccagtaccgagagatcaaaagcggctccgtcgacggaagcaacgccaacgcctactttggatacagcaccccctgggggtactttgactttaaccgcttccacagccactggagcccccgagactggcaaagactcatcaacaactactggggcttcagaccccggtccctcagagtcaaaatcctcaacattcaagtcaaagaggtcacggtgcaggactccaccaccaccatcgccaacaacctcacctccaccgtccaagtgtttacggacgacgactaccagctgccctacgtcgtcggcaacgggaccgagggatgcctgccggccttccctccgcaggtctttacgctgccgcagtacggttacgcgacgctgaaccgcgacaacacagaaaatcccaccgagaggagcagcttcttctgcctagagtactttcccagcaagatgctgagaacgggcaacaactttgagtttacctacaactttgaggaggtgcccttccactccagcttcgctcccagtcagaacctcttcaagctggccaacccgctggtgggccagtacttgtaccgcttcgtgagcacaaataacactggcggagtccagttcaacgagaacctggccgggagatacgccaacacctacaaaaactggttcccggggcccatgggccgaacccagggctggaacctgggctccggggtcaaccgcgccagtgtcagcgccttcgccacgaccaataggatggagctcgagggcgcgagttaccaggtgcccccgcagccgaacggcatgaccaacaacctccagggcagcaacacctatgccctggagaacactatgatcttcaacagccagccggcgaacccgggcaccaccgccacgtacctcgagggcaacatgctcatcaccagcgagagcgagacgcagccggtgaaccgcgtggcgtacaacgtcggcgggcagatggccaccaacaaccagagctccaccactgcccccgcgaccggcacgtacaacctccaggaaatcgtgcccggcagcgtgtggatggagagggacgtgtacctccaaggacccatctgggccaagatcccagagacgggggcgcactttcacccctctccggccatgggcggattcggactcaaacacccaccgcccatgatgctcatcaagaacacgcctgtgcccggaaatatcaccagcttctcggacgtgcccgtcagcagcttcatcacccagtacagcaccgggcaggccaccgtggagatggagtgggagctcaagaaggaaaactccaagaggtggaacccagagatccagtacacaaacaactacaacgacccccagtttgtggactttgccccggacagcaccggggaatacagaaccaccagacctatcggaacccgataccttacccgacccctttaa

SEQ ID NO: 645 - protein, 724 aa, Artificial Sequence
  Description of Artificial Sequence: Synthetic polypeptide
MSFVDHPPDWLEEVGEGLREFLGLEAGPPKPKPNQQHQDQARGLVLPGYNYLGPGNGLDRGEPVNRADEVAREHDISYNEQLEAGDNPYLKYNHADAEFQEKLADDTSFGGNLGKAVFQAKKRVLEPFGLVEEGAKTAPTGKRIDDHFPKRKKARTEEDSKPSTSSDAEAGPSGSQQLQIPAQPASSLGADTMSAGGGGPLGDNNQGADGVGNASGDWHCDSTWMGDRVVTKSTRTWVLPSYNNHQYREIKSGSVDGSNANAYFGYSTPWGYFDFNRFHSHWSPRDWQRLINNYWGFRPRSLRVKILNIQVKEVTVQDSTTTIANNLTSTVQVFTDDDYQLPYVVGNGTEGCLPAFPPQVFTLPQYGYATLNRDNTENPTERSSFFCLEYFPSKMLRTGNNFEFTYNFEEVPFHSSFAPSQNLFKLANPLVGQYLYRFVSTNNTGGVQFNENLAGRYANTYKNWFPGPMGRTQGWNLGSGVNRASVSAFATTNRMELEGASYQVPPQPNGMTNNLQGSNTYALENTMIFNSQPANPGTTATYLEGNMLITSESETQPVNRVAYNVGGQMATNNQSSTTAPATGTYNLQEIVPGSVWMERDVYLQGPIWAKIPETGAHFHPSPAMGGFGLKHPPPMMLIKNTPVPGNITSFSDVPVSSFITQYSTGQATVEMEWELKKENSKRWNPEIQYTNNYNDPQFVDFAPDSTGEYRTTRPIGTRYLTRPL

SEQ ID NO: 646 - DNA, 2175 bp, Artificial Sequence
  Description of Artificial Sequence: Synthetic polynucleotide
atgtcttttgttgatcaccctccagattggttggaagaagttggtgaaggtcttcgcgagtttttgggccttgaagcgggcccaccgaaaccaaaacccaatcagcagcatcaagatcaagcccgtggtcttgtgctgcctggttataactatctcggacccggaaacggcctcgatcgaggagagcctgtcaacagggcagacgaggtcgcgcgagagcacgacatctcgtacaacgagcagcttgaggcgggagacaacccctacctcaagtacaaccacgcggacgccgagtttcaggagaagctcgccgacgacacatccttcgggggaaacctcggaaaggcagtctttcaggccaagaaaagggttctcgaaccttttggcctggttgaagagggtgctaagacggcccctaccggaaagcggatagacgaccactttccaaaaagaaagaaggcccggaccgaagaggactccaagccttccacctcgtcagacgccgaagctggacccagcggatcccagcagctgcaaatcccagcccaaccagcctcaagtttgggagctgatacaatgtctgcgggaggtggcggcccattgggcgacaataaccaaggtgccgatggagtgggcaatgcctcgggagattggcattgcgattccacgtggatgggggacagagtcgtcaccaagtccacccgaacctgggtgctgcccagctacaacaaccaccagtaccgagagatcaaaagcggctccgtcgacggaagcaacgccaacgcctactttggatacagcaccccctgggggtactttgactttaaccgcttccacagccactggagcccccgagactggcaaagactcatcaacaactactggggcttcagaccccggtccctcagagtcaaaatcttcaacattcaagtcaaagaggtcacggtgcaggactccaccaccatcatcgccaacaacctcacctccaccgtccaagtgtttacggacgacgactaccagctgccctacgtcgtcggcaacgggaccgagggatgcctgccggccttccctccgcaggtctttacgctgccgcagtacggttacgcgacgctgaaccgcgacaacacagaaaatcccaccgagaggagcagcttcttctgcctagagtactttcccagcaagatgctgagaacgggcaacaactttgagtttacctacaactttgaggaggtgcccttccactccagcttcgcccccagtcagaacctcttcaagctggccaacccgctggtggaccagtacttgtaccgcttcgtgagcacaaataacactggcggagtccagttcaacaagaacctggccgggagatacgccaacacctacaaaaactggttcccggggcccatgggccgaacccagggctggaacctgggctccggggtcaaccgcgccagtgtcagcgccttcgccacgaccaataggatggagctcgagggcgcgagttaccaggtgcccccgcagccgaacggcatgaccaacaacctccagggcagcaacacctatgccctggagaacactatgatcttcaacagccagccggcgaacccgggcaccaccgccacgtacctcgagggcaacatgctcatcaccagcgagagcgagacgcagccggtgaaccgcgtggcgtacaacgtcggcgggcagatggccaccaacaaccagagctccaccactgcccccgcgaccggcacgtacaacctccaggaaatcgtgcccggcagcgtgtggatggagagggacgtgtacctccaaggacccatctgggccaagatcccagagacgggggcgcactttcacccctctccggccatgggcggattcggactcaaacacccaccgcccatgatgctcatcaagaacacgcctgtgcccggaaatatcaccagcttctcggacgtgcccgtcagcagcttcatcacccagtacagcaccgggcaggtcaccgtggagatggagtgggagctcaagaaggaaaactccaagaggtggaacccagagatccagtacacaaacaactacaacgacccccagtttgtggactttgccccggacagcaccggggaatacagaaccaccagacctatcggaacccgataccttacccgacccctttaa

SEQ ID NO: 647 - protein, 724 aa, Artificial Sequence
  Description of Artificial Sequence: Synthetic polypeptide
MSFVDHPPDWLEEVGEGLREFLGLEAGPPKPKPNQQHQDQARGLVLPGYNYLGPGNGLDRGEPVNRADEVAREHDISYNEQLEAGDNPYLKYNHADAEFQEKLADDTSFGGNLGKAVFQAKKRVLEPFGLVEEGAKTAPTGKRIDDHFPKRKKARTEEDSKPSTSSDAEAGPSGSQQLQIPAQPASSLGADTMSAGGGGPLGDNNQGADGVGNASGDWHCDSTWMGDRVVTKSTRTWVLPSYNNHQYREIKSGSVDGSNANAYFGYSTPWGYFDFNRFHSHWSPRDWQRLINNYWGFRPRSLRVKIFNIQVKEVTVQDSTTIIANNLTSTVQVFTDDDYQLPYVVGNGTEGCLPAFPPQVFTLPQYGYATLNRDNTENPTERSSFFCLEYFPSKMLRTGNNFEFTYNFEEVPFHSSFAPSQNLFKLANPLVDQYLYRFVSTNNTGGVQFNKNLAGRYANTYKNWFPGPMGRTQGWNLGSGVNRASVSAFATTNRMELEGASYQVPPQPNGMTNNLQGSNTYALENTMIFNSQPANPGTTATYLEGNMLITSESETQPVNRVAYNVGGQMATNNQSSTTAPATGTYNLQEIVPGSVWMERDVYLQGPIWAKIPETGAHFHPSPAMGGFGLKHPPPMMLIKNTPVPGNITSFSDVPVSSFITQYSTGQVTVEMEWELKKENSKRWNPEIQYTNNYNDPQFVDFAPDSTGEYRTTRPIGTRYLTRPL

SEQ ID NO: 648 - DNA, 2175 bp, Artificial Sequence
  Description of Artificial Sequence: Synthetic polynucleotide
atgtcttttgttgatcaccctccagattggttggaagaagttggtgaaggtcttcgcgagtttttgggccttgaagcgggcccaccgaaaccaaaacccaatcagcagcatcaagatcaagcccgtggtcttgtgctgcctggttataactatctcggacccggaaacggtctcgatcgaggagagcctgtcaacagggcagacgaggtcgcgcgagagcacgacatctcgtacaacgagcagcttgaggcgggagacaacccctacctcaagtacaaccacgcggacgccgagtttcaggagaagctcgccgacgacacatccttcgggggaaacctcggaaaggcagtctttcaggccaagaaaagggttctcgaaccttttggcctggttgaagagggtgctaagacggcccctaccggaaagcggatagacgaccactttccaaaaagaaagaaggcccggaccgaagaggactccaagccttccacctcgtcagacgccgaagctggacccagcggatcccagcagctgcaaatcccagcccaaccagcctcaagtttgggagctgatacaatgtctgcgggaggtggcggcccattgggcgacaataaccaaggtgccgatggagtgggcaatgcctcgggagattggcattgcgattccacgtggatgggggacagagtcgtcaccaagtccacccgaacctgggtgctgcccagctacaacaaccaccagtaccgagagatcaaaagcggctccgtcgacggaagcaacgccaacgcctactttggatacagcaccccctgggggtactttgactttaaccgcttccacagccactggagcccccgagactggcaaagactcatcaacaactactggggcttcagaccccggtccctcagagtcaaaatcttcaacattcaagtcaaagaggtcacggtgcaggactccaccaccaccatcgccaacaacctcacctccaccgtccaagtgtttacggacgacgactaccagctgccctacgtcgtcggcaacgggaccgagggatgcctgccggccttccctccgcaggtctttacgctgccgcagtacggttacgcgacgctgaaccgcgacaacacagaaaatcccaccgagaggagcagcttcttctgcctagagtactttcccagcaagatgctgagaacgggcaacaactttgagtttacctacaactttgaggaggtgcccttccactccagcttcgctcccagtcagaacctcttcaagctggccaacccgctggtggaccagtacttgtaccgcttcgtgagcacaaataacactggcggagtccagttcaacaagaacctggccgggagatacgccaacacctacaaaaactggttcccggggcccatgggccgaacccagggctggaacctgggctccggggtcaaccgcgccagtgtcagcgccttcgccacgaccaataggatggagctcgagggcgcgagttaccaggtgcccccgcagccgaacggcatgaccaacaacctccagggcagcaacacctatgccctggagaacactatgatcttcaacagccagccggcgaacccgggcaccaccgccacgtacctcgagggcaacatgctcatcaccagcgagagcgagacgcagccggtgaaccgcgtggcgtacaacgtcggcgggcagatggccaccaacaaccagagctccaccactgcccccgcgaccggcacgtacaacctccaggaaatcgtgcccggcagcgtgtggatggagagggacgtgtacctccaaggacccatctgggccaagatcccagagacgggggcgcactttcacccctctccggccatgggcggattcggactcaaacacccaccgcccatgatgctcatcaagaacacgcctgtgcccggaaatatcaccagcctctcggacgtgcccgtcagcagcttcatcacccagtacagcaccgggcaggtcaccgtggagatggagtgggagctcaagaaggaaaactccaagaggtggaacccagagatccagtacacaaacaactacaacgacccccagtttgtggactttgccccggacagcaccggggaatacagaaccaccagacctatcggaacccgataccttacccgacccctttaa

SEQ ID NO: 649 - protein, 724 aa, Artificial Sequence
  Description of Artificial Sequence: Synthetic polypeptide
MSFVDHPPDWLEEVGEGLREFLGLEAGPPKPKPNQQHQDQARGLVLPGYNYLGPGNGLDRGEPVNRADEVAREHDISYNEQLEAGDNPYLKYNHADAEFQEKLADDTSFGGNLGKAVFQAKKRVLEPFGLVEEGAKTAPTGKRIDDHFPKRKKARTEEDSKPSTSSDAEAGPSGSQQLQIPAQPASSLGADTMSAGGGGPLGDNNQGADGVGNASGDWHCDSTWMGDRVVTKSTRTWVLPSYNNHQYREIKSGSVDGSNANAYFGYSTPWGYFDFNRFHSHWSPRDWQRLINNYWGFRPRSLRVKIFNIQVKEVTVQDSTTTIANNLTSTVQVFTDDDYQLPYVVGNGTEGCLPAFPPQVFTLPQYGYATLNRDNTENPTERSSFFCLEYFPSKMLRTGNNFEFTYNFEEVPFHSSFAPSQNLFKLANPLVDQYLYRFVSTNNTGGVQFNKNLAGRYANTYKNWFPGPMGRTQGWNLGSGVNRASVSAFATTNRMELEGASYQVPPQPNGMTNNLQGSNTYALENTMIFNSQPANPGTTATYLEGNMLITSESETQPVNRVAYNVGGQMATNNQSSTTAPATGTYNLQEIVPGSVWMERDVYLQGPIWAKIPETGAHFHPSPAMGGFGLKHPPPMMLIKNTPVPGNITSLSDVPVSSFITQYSTGQVTVEMEWELKKENSKRWNPEIQYTNNYNDPQFVDFAPDSTGEYRTTRPIGTRYLTRPL

SEQ ID NO: 650 - DNA, 2175 bp, Artificial Sequence
  Description of Artificial Sequence: Synthetic polynucleotide
atgtcttttgttgatcaccctccagattggttggaagaagttggtgaaggtcttcgcgagtttttgggccttgaggcgggcccaccgaaaccaaaacccaatcagcagcatcaagatcaagcccgtggtcttgtgctgcctggttataactatctcggacccggaaacggtctcgatcgaggagagcctgtcaacagggcagacgaggtcgcgcgagagcacgacatctcgtacaacgagcagcttgaggcgggagacaacccctacctcaagtacaaccacgcggacgccgagtttcaggagaagctcgccgacgacacatccttcgggggaaacctcggaaaggcagtctttcaggccaagaaaagggttctcgaaccttttggcctggttgaagagggtgctaagacggcccctaccggaaagcggatagacgaccactttccaaaaagaaagaaggcccggaccgaagaggactccaagccttccaccccgtcagacgccgaagctggacccagcggatcccagcagctgcaaatcccagcccaaccagcctcaagtttgggagctgatacaatgtctgcgggaggtggcggcccattgggcgacaataaccaaggtgccgatggagtgggcaatgcctcgggagattggcattgcgattccacgtggatgggggacagagtcgtcaccaagtccacccgaacctgggtgctgcccagctacaacaaccaccagtaccgagagatcaaaagcggctccgtcgacggaagcaacgccaacgcctactttggatacagcaccccctgggggtactttgactttaaccgcttccacagccactggagcccccgagactggcaaagactcatcaacaactactggggcttcagaccccggtccctcagagtcaaaatcttcaacattcaagtcaaagaggtcacggtgcaggactccaccaccaccatcgccaacaacctcacctccaccgtccaagtgtttacggacgacgactaccagctgccctacgtcgtcggcaacgggaccgagggatgcctgccggccttccctccgcaggtctttacgctgccgcagtacggttacgcgacgctgaaccgcgacaacacagaaaatcccaccgagaggagcagcttcttctgcctagagtactttcccagcaagatgctgagaacgggcaacaactttgagtttacctacaactttgaggaggtgcccttccactccagcttcgctcccagtcagaacctcttcaagctggccaacccgctggtggaccagtacttgtaccgcttcgtgagcacaaataacactggcggagtccagttcaacaagaacctggccgggagatacgccaacacctacaaaaactggttcccggggcccatgggccgaacccagggctggaacctgggctccggggtcaaccgcgccagtgtcagcgccttcgccacgaccaataggatggagctcgagggcgcgagttaccaggtgcccccgcagccgaacggcatgaccaacaacctccagggcagcaacacctatgccctggagaacactatgatcttcaacagccagccggcgaacccgggcaccaccgccacgtacctcgagggcaacatgctcatcaccagcgagagcgagacgcagccggtgaaccgcgtggcgtacaacgtcggcgggcagatggccaccaacaaccagagctccaccactgcccccgcgaccggcacgtacaacctccaggaaatcgtgcccggcagcgtgtggatggagagggacgtgtacctccaaggacccatctgggccaagatcccagagacgggggcgcactttcacccctctccggccatgggcggattcggactcaaacacccaccgcccatgatgctcatcaagaacacgcctgtgcccggaaatatcaccagcttctcggacgtgcccgtcagcagcttcatcacccagtacagcaccgggcaggtcaccgtggagatggagtgggagctcaagaaggaaaactccaagaggtggaacccagagatccagtacacaaacaactacaacgacccccagtttgtggactttgccccggacagcaccggggaatacagaaccaccagacctatcggaacccgataccttacccgacccctttaa

SEQ ID NO: 651 - protein, 724 aa, Artificial Sequence
  Description of Artificial Sequence: Synthetic polypeptide
MSFVDHPPDWLEEVGEGLREFLGLEAGPPKPKPNQQHQDQARGLVLPGYNYLGPGNGLDRGEPVNRADEVAREHDISYNEQLEAGDNPYLKYNHADAEFQEKLADDTSFGGNLGKAVFQAKKRVLEPFGLVEEGAKTAPTGKRIDDHFPKRKKARTEEDSKPSTPSDAEAGPSGSQQLQIPAQPASSLGADTMSAGGGGPLGDNNQGADGVGNASGDWHCDSTWMGDRVVTKSTRTWVLPSYNNHQYREIKSGSVDGSNANAYFGYSTPWGYFDFNRFHSHWSPRDWQRLINNYWGFRPRSLRVKIFNIQVKEVTVQDSTTTIANNLTSTVQVFTDDDYQLPYVVGNGTEGCLPAFPPQVFTLPQYGYATLNRDNTENPTERSSFFCLEYFPSKMLRTGNNFEFTYNFEEVPFHSSFAPSQNLFKLANPLVDQYLYRFVSTNNTGGVQFNKNLAGRYANTYKNWFPGPMGRTQGWNLGSGVNRASVSAFATTNRMELEGASYQVPPQPNGMTNNLQGSNTYALENTMIFNSQPANPGTTATYLEGNMLITSESETQPVNRVAYNVGGQMATNNQSSTTAPATGTYNLQEIVPGSVWMERDVYLQGPIWAKIPETGAHFHPSPAMGGFGLKHPPPMMLIKNTPVPGNITSFSDVPVSSFITQYSTGQVTVEMEWELKKENSKRWNPEIQYTNNYNDPQFVDFAPDSTGEYRTTRPIGTRYLTRPL

SEQ ID NO: 652 - DNA, 2211 bp, Artificial Sequence
  Description of Artificial Sequence: Synthetic polynucleotide
atggctgctgacggttatcttccagattggctcgaggacaacctttctgaaggcattcgtgagtggtgggctctgaaacctggagtccctcaacccaaagcgaaccaacaacaccaggacaaccgtcggggtcttgtgcttccgggttacaaatacctcggacccggtaacggactcgacaaaggagagccggtcaacgaggcggacgcggcagccctcgaacacgacaaagcttacgaccagcagctcaaggccggtgacaacccgtacctcaagtacaaccacgccgacgccgagtttcaggagcgtcttcaagaagatacgtcttttgggggcaaccttggcagagcagtcttccaggccaaaaagaggatccttgagcctcttggtctggttgaggaagcagctaaaacggctcctggaaagaagaggcctgtagatcagtctcctcaggaaccggactcatcatctggtgttggcaaatcgggcaaacagcctgccagaaaaagactaaatttcggtcagactggcgactcagagtcagtcccagaccctcaacctctcggagaaccaccagcagcccccacaagtttgggatctaatacaatggcttcaggcggtggcgcaccaatggcagacaataacgagggtgccgatggagtgggtaattcctcaggaaattggcattgcgattcccaatggctgggcgacagagtcatcaccaccagcaccagaacctgggccctgcccacttacaacaaccatctctacaagcaaatctccagccaatcaggagcttcaaacgacaaccactactttggctacagcaccccttgggggtattttgactttaacagattccactgccacttctcaccacgtgactggcagcgactcattaacaacaactggggattccggcccaagaaactcagcttcaagctcttcaacatccaagttaaagaggtcacgcagaacgatggcacgacgactattgccaataaccttaccagcacggttcaagtgtttacggactcggagtatcagctcccgtacgtgctcgggtcggcgcaccaaggctgcctcccgccgtttccagcggacgtcttcatggtccctcagtatggatacctcaccctgaacaacggaagtcaagcggtgggacgctcatccttttactgcccggagtacttcccttcgcagatgctaaggactggaaataacttccaattcagctataccttcgaggatgtaccttttcacagcagctacgctcacagccagagtttggatcgcttgatgaatcctcttattgatcagtatctgtactacctgaacagaacgcaaggaacaacctctggaacaaccaaccaatcacggctgctttttagccaggctgggcctcagtctatgtctttgcaggccagaaattggctacctgggccctgctaccggcaacagagactttcaaagactgctaacgacaacaacaacagtaactttccttggacagcggccagcaaatatcatctcaatggccgcgactcgctggtgaatccaggaccagctatggccagtcacaaggacgatgaagaaaaatttttccctatgcacggcaatctaatatttggcaaagaagggacaacggcaagtaacgcagaattagataatgtaatgattacggatgaagaagagattcgtaccaccaatcctgtggcaacagagcagtatggaactgtggcaaataacttgcagagctcaaatacagctcccacgactagaactgtcaatgatcagggggccttacctggcatggtgtggcaagatcgtgacgtgtaccttcaaggacctatctgggcaaagattcctcacacggatggacactttcatccttctcctctgatgggaggctttggactgaaacatccgcctcctcaaatcatgatcaaaaatactccggtaccggcaaatcctccgacgactttcagcccggccaagtttgcttcatttatcactcagtactccactggacaggtcagcgtggaaattgagtgggagctacagaaagaaaacagcaaacgttggaatccagagattcagtacacttccaactacaacaagtctgttaatgtggactttactgtagacactaatggtgtttatagtgaacctcaccctattggaacccggtatctcacacgaaacttgtaa

SEQ ID NO: 653 - protein, 736 aa, Artificial Sequence
  Description of Artificial Sequence: Synthetic polypeptide
MAADGYLPDWLEDNLSEGIREWWALKPGVPQPKANQQHQDNRRGLVLPGYKYLGPGNGLDKGEPVNEADAAALEHDKAYDQQLKAGDNPYLKYNHADAEFQERLQEDTSFGGNLGRAVFQAKKRILEPLGLVEEAAKTAPGKKRPVDQSPQEPDSSSGVGKSGKQPARKRLNFGQTGDSESVPDPQPLGEPPAAPTSLGSNTMASGGGAPMADNNEGADGVGNSSGNWHCDSQWLGDRVITTSTRTWALPTYNNHLYKQISSQSGASNDNHYFGYSTPWGYFDFNRFHCHFSPRDWQRLINNNWGFRPKKLSFKLFNIQVKEVTQNDGTTTIANNLTSTVQVFTDSEYQLPYVLGSAHQGCLPPFPADVFMVPQYGYLTLNNGSQAVGRSSFYCPEYFPSQMLRTGNNFQFSYTFEDVPFHSSYAHSQSLDRLMNPLIDQYLYYLNRTQGTTSGTTNQSRLLFSQAGPQSMSLQARNWLPGPCYRQQRLSKTANDNNNSNFPWTAASKYHLNGRDSLVNPGPAMASHKDDEEKFFPMHGNLIFGKEGTTASNAELDNVMITDEEEIRTTNPVATEQYGTVANNLQSSNTAPTTRTVNDQGALPGMVWQDRDVYLQGPIWAKIPHTDGHFHPSPLMGGFGLKHPPPQIMIKNTPVPANPPTTFSPAKFASFITQYSTGQVSVEIEWELQKENSKRWNPEIQYTSNYNKSVNVDFTVDTNGVYSEPHPIGTRYLTRNL

SEQ ID NO: 654 - DNA, 2211 bp, Artificial Sequence
  Description of Artificial Sequence: Synthetic polynucleotide
atggctgctgatggttatcttccagattggctcgaggacaacctttctgaaggcattcgtgagtggtgggctctgaaacctggagtccctcaacccaaagcgaaccaacaacaccaggacaaccgtcggggtcttgtgcttccgggttacaaatacctcggacccggtaacggactcgacaaaggagagccggtcaacgaggcggacgcggcagccctcgaacacgacaaagcttacgaccagcagctcaaggccggtgacaacccgtacctcaagtacaaccacgccgacgccgagtttcaggagcgtcttcaagaagatacgtcttttgggggcaaccttggcagagcagtcttccaggccaaaaagaggatccttgagcctcttggtctggttgaggaagcagctaaaacggctcctggaaagaagaggcctgtagatcagtctcctcaggaaccggactcatcatctggtgttggcaaatcgggcaaacagcctgccagaaaaagactaaatttcggtcagactggcgactcagagtcagtcccagaccctcaacctctcggagaaccaccagcagcccccacaagtttgggatctaatacaatggcttcaggcggtggcgcaccaatggcagacaataacgagggtgccgatggagtgggtaattcctcaggaaattggcattgcgattcccaatggctgggcgacagagtcatcaccaccagcaccagaacctgggccctgcccacttacaacaaccatctctacaagcaaatctccagccaatcaggagcttcaaacgacaaccactactttggctacagcaccccttgggggtattttgactttaacagattccactgccacttctcaccacgtgactggcagcgactcattaacaacaactggggattccggcccaagaaactcagcttcaagctcttcaacatccaagttaaagaggtcacgcagaacgatggcacgacgactgttgccaataaccttaccagcacggttcaagtgtttacggactcggagtatcaactcccgtacgtgctcgggtcggcgcaccaaggctgtctcccgccgtttccagcggacgtcttcatggtccctcagtatggatacctcaccctgaacaacggaagtcaagcggtgggacgctcatccttttactgcctggagtacttcccttcgcagatgctaaggactggaaataacttccaattcagctataccttcgaggatgtaccttttcacagcagctacgctcacagccagagtttggatcgcttgatgaatcctcttattgatcagtatctgtactacctgaacagaacgcaaggaacaacctctggaacaaccaaccaatcacggctgctttttagccaggctgggcctcagtctatgtctttgcaggccagaaattggctacctgggccctgctaccggcaacagagactttcaaagactgctaacgacaacaacaacagtaactttccttggacagcggccagcaaatatcatctcaatggccgcgactcgctggtgaatccaggaccagctatggccagtcacaaggacgatgaagaaaaatttttccctatgcacggcaatctaatatttggcaaagaagggacaacggcaagtaacgcagaattagataatgtaatgattacggatgaagaagagattcgtaccaccaatcctgtggcaacagagcagtatggaactgtggcaaataacttgcagagctcaaatacagctcccacgactagaactgtcaatgatcagggggccttacctggcatggtgtggcaagatcgtgacgtgtaccttcaaggacctatctgggcaaagattcctcacacggatggacactttcatccttctcctctgatgggaggctttggactgaaacatccgcctcctcaaatcatgatcaaaaatactccggtaccggcaaatcctccgacgactttcagcccggccaagtttgcttcatttatcactcagtactccactggacaggtcagcgtggaaattgagtgggagctacagaaagaaaacagcaaacgttggaatccagagattcagtacacttccaactacaacaagtctgttaatgtggactttactgtagacactaatggtgtttatagtgaacctcgccctattggaacccggtatctcacacgaaacttgtaa

SEQ ID NO: 655 - protein, 736 aa, Artificial Sequence
  Description of Artificial Sequence: Synthetic polypeptide
MAADGYLPDWLEDNLSEGIREWWALKPGVPQPKANQQHQDNRRGLVLPGYKYLGPGNGLDKGEPVNEADAAALEHDKAYDQQLKAGDNPYLKYNHADAEFQERLQEDTSFGGNLGRAVFQAKKRILEPLGLVEEAAKTAPGKKRPVDQSPQEPDSSSGVGKSGKQPARKRLNFGQTGDSESVPDPQPLGEPPAAPTSLGSNTMASGGGAPMADNNEGADGVGNSSGNWHCDSQWLGDRVITTSTRTWALPTYNNHLYKQISSQSGASNDNHYFGYSTPWGYFDFNRFHCHFSPRDWQRLINNNWGFRPKKLSFKLFNIQVKEVTQNDGTTTVANNLTSTVQVFTDSEYQLPYVLGSAHQGCLPPFPADVFMVPQYGYLTLNNGSQAVGRSSFYCLEYFPSQMLRTGNNFQFSYTFEDVPFHSSYAHSQSLDRLMNPLIDQYLYYLNRTQGTTSGTTNQSRLLFSQAGPQSMSLQARNWLPGPCYRQQRLSKTANDNNNSNFPWTAASKYHLNGRDSLVNPGPAMASHKDDEEKFFPMHGNLIFGKEGTTASNAELDNVMITDEEEIRTTNPVATEQYGTVANNLQSSNTAPTTRTVNDQGALPGMVWQDRDVYLQGPIWAKIPHTDGHFHPSPLMGGFGLKHPPPQIMIKNTPVPANPPTTFSPAKFASFITQYSTGQVSVEIEWELQKENSKRWNPEIQYTSNYNKSVNVDFTVDTNGVYSEPRPIGTRYLTRNL

SEQ ID NO: 656 - DNA, 2175 bp, Artificial Sequence
  Description of Artificial Sequence: Synthetic polynucleotide
atgtcttttgttgatcaccctccagattggttggaagaagttggtgaaggtcttcgcgagtttttgggccttgaagcgggcccaccgaaaccaaaacccaatcagcagcatcaagatcaagcccgtggtcttgtgctgcctggttataactatctcggacccggaaacggtctcgatcgaggagagcctgtcaacagggcagacgaggtcgcgcgagagcacgacatctcgtacaacgagcagcttgaggcgggagacaacccctacctcaagtacaaccacgcggacgccgagtttcaggagaagctcgccgacgacacatccttcgggggaaacctcggaaaggcagtctttcaggccaagaaaagggttctcgaaccttttggcctggttgaagagggtgctaagacggcccctaccggaaagcggatagacgaccactttccaaaaagaaagaaggcccggaccgaagaggactccaagccttccacctcgtcagacgccgaagctggacccagcggatcccagcagctgcaaatcccagcccaaccagcctcaagtttgggagctgatacaatgtctgcgggaggtggcggcccattgggcgacaataaccaaggtgccgatggagtgggcaatgcctcgggagattggcattgcgattccacgtggatgggggacagagtcgtcaccaagtccacccgaacctgggtgctgcccagctacaacaaccaccagtaccgagagatcaaaagcggctccgtcgacggaagcaacgccaacgcctactttggatacagcaccccctgggggtactttgactttaaccgcttccacagccactggagcccccgagactggcaaagactcatcaacaactactggggcttcagaccccggtccctcagagtcaaaatcttcaacattcaagtcaaagaggtcacggtgcaggactccaccaccaccatcgccaacaacctcacctccaccgtccaagtgtttacggacgacgactaccagctgccctacgtcgtcggcaacgggaccgagggatgcctgccggccttccctccgcaggtctttacgctgccgcagtacggttacgcgacgctgaaccgcgacaacacagaaaatcccaccgagaggagcagcttcttctgcctagagtactttcccagcaagatgctgagaacgggcaacaactttgagtttacctacaactttgaggaggtgcccttccactccagcttcgctcccagtcagaacctcttcaagctggccaacccgctggtggaccagtacttgtaccgcttcgtgagcacaaataacactggcggagtccagttcaacaagaacctggccgggagatacgccaacacccacaaaaactggttcccggggcccatgggccgaacccagggctggaacctgggctccggggtcaaccgcgccagtgtcagcgccttcgccacgaccaataggatggagctcgagggcgcgagttaccaggtgcccccgcagtcgaacggcatgaccaacaacctccggggcagcaacacctatgccctggagaacactatgatcttcaacagccagccggcgaacccgggcaccaccgccacgtacctcgagggcaacatgctcatcaccagcgagagcgagacgcagccggtgaaccgcgtggcgtacaacgtcggcgggcagatggccaccaacaaccagagctccaccactgcccccgcgaccggcacgtacaacctccaggaaatcgtgcccggcagcgtgtggatggagagggacgtgtacctccaaggacccatctgggccaagatcccagagacgggggcgcactttcacccctctccggccatgggcggattcggactcaaacacccaccgcccatgatgctcatcaagaacacgcctgtgcccggaaatatcaccagcttctcggacgtgcccgtcagcagcttcatcacccagtacagcaccgggcaggtcaccgtggagatggagtgggagctcaagaaggaaaactccaagaggtggaacccagagatccagtacacaaacaactacaacgacccccagtttgtggactttgccccggacagcaccggggaatacagaaccaccagacctatcggaacccgataccttacccgacccctttaa

SEQ ID NO: 657 - protein, 724 aa, Artificial Sequence
  Description of Artificial Sequence: Synthetic polypeptide
MSFVDHPPDWLEEVGEGLREFLGLEAGPPKPKPNQQHQDQARGLVLPGYNYLGPGNGLDRGEPVNRADEVAREHDISYNEQLEAGDNPYLKYNHADAEFQEKLADDTSFGGNLGKAVFQAKKRVLEPFGLVEEGAKTAPTGKRIDDHFPKRKKARTEEDSKPSTSSDAEAGPSGSQQLQIPAQPASSLGADTMSAGGGGPLGDNNQGADGVGNASGDWHCDSTWMGDRVVTKSTRTWVLPSYNNHQYREIKSGSVDGSNANAYFGYSTPWGYFDFNRFHSHWSPRDWQRLINNYWGFRPRSLRVKIFNIQVKEVTVQDSTTTIANNLTSTVQVFTDDDYQLPYVVGNGTEGCLPAFPPQVFTLPQYGYATLNRDNTENPTERSSFFCLEYFPSKMLRTGNNFEFTYNFEEVPFHSSFAPSQNLFKLANPLVDQYLYRFVSTNNTGGVQFNKNLAGRYANTHKNWFPGPMGRTQGWNLGSGVNRASVSAFATTNRMELEGASYQVPPQSNGMTNNLRGSNTYALENTMIFNSQPANPGTTATYLEGNMLITSESETQPVNRVAYNVGGQMATNNQSSTTAPATGTYNLQEIVPGSVWMERDVYLQGPIWAKIPETGAHFHPSPAMGGFGLKHPPPMMLIKNTPVPGNITSFSDVPVSSFITQYSTGQVTVEMEWELKKENSKRWNPEIQYTNNYNDPQFVDFAPDSTGEYRTTRPIGTRYLTRPL

SEQ ID NO: 658 - DNA, 2175 bp, Artificial Sequence
  Description of Artificial Sequence: Synthetic polynucleotide
atgtcttttgttgatcaccctccagattggttggaagaagttggtgaaggtcttcgcgagtttttgggccttgaagcgggcccaccgaaaccaaaacccaatcagcagcatcaagatcaagcccgtggtcttgtgctgcctggttataactatctcggacccggaaacggtctcgatcgaggagagcctgtcaacagggcagacgaggtcgcgcgagagcacgacatctcgtacaacgagcagcttgaggcgggagacaacccctacctcaagtacaaccacgcggacgccgagtttcaggagaagctcgccgacgacacatccttcgggggaaacctcggaaaggcagtctttcaggccaagaaaagggttctcgaaccttttggcctggttgaagagggtgctaagacggcccctaccggaaagcggatagacgaccactttccaaaaagaaagaaggcccggaccgaagaggactccaagccttccacctcgtcagacgccgaagctggacccagcggatcccagcagctgcaaatcccagcccaaccagcctcaagtttgggagctgatacaatgtctgcgggaggtggcggcccattgggcgacaataaccaaggtgccgatggagtgggcaatgcctcgggagattggcattgcgattccacgtggatgggggacagagtcgtcaccaagtccacccgaacctgggtgctgcccagctacaacaaccaccagtaccgagagatcaaaagcggctccgtcgacggaagcaacgccaacgcctactttggatacagcaccccctgggggtactttgactttaaccgcttccacagccactggagcccccgagactggcaaagactcatcaacaactactggggcttcagaccccggtccctcagagtcaaaatcttcaacattcaagtcaaagaggtcacggtgcaggactccaccaccaccatcgccaacaacctcacctccaccgtccaagtgtttacggacgacgactaccagctgccctacgtcgtcggcaacgggaccgagggatgcctgccggccttccctccgcaggtctttacgctgccgcagtacggttacgcgacgctgaaccgcgacaacacagaaaatcccaccgagaggagcagcttcttctgcctagagtactttcccagcaagatgctgagaacgggcaacaactttgagtttacctacaactttgaggaggtgcccttccactccagcttcgctcccagtcagaacctcttcaagctggccaacccgctggtggaccagtacttgtaccgcttcgtgagcacaaataacactggcggagtccagttcaacaagaacctggccgggagatacgccaacacctacaaaaactggttcccggggcccatgggccgaacccagggctggaacctgggctccggggtcaaccgcgccagtgtcagcgccttcgccacgaccaataggatggagctcgagggcgcgagttaccaggtgcccccgcagccgaacggcatgaccaacaacctccagggcagcaacacctatgccctggagaacactatgatcttcaacagccagccggcgaacccgggcaccaccgccacgtacctcgagggcaacatgctcatcaccagcgagagcgagacgcagccggtgaaccgcgtggcgtacagcgtcggcgggcagatggccaccaacaaccagagctccaccactgcccccacgaccggcacgtacaacctccaggaaatcgtgcccggcagcgtgtggatggagagggacgtgtacctccaaggacccatctgggccaagatcccagagacgggggcgcactttcacccctctccggccatgggcggattcagactcaaacacccaccgcccatgatgctcatcaagaacacgcctgtgcccggaaatatcaccagcttctcggacgtgcccgtcagcagcttcatcacccagtacagcaccgggcaggtcaccgtggagatggagtgggagctcaagaaggaaaactccaagaggtggaacccagagatccagtacacaaacaactacaacgacccccagtttgtggactttgccccggacagcaccggggaatacagaaccaccagacctatcggaacccgataccttacccgacccctttaa

SEQ ID NO: 659 - protein, 724 aa, Artificial Sequence
  Description of Artificial Sequence: Synthetic polypeptide
MSFVDHPPDWLEEVGEGLREFLGLEAGPPKPKPNQQHQDQARGLVLPGYNYLGPGNGLDRGEPVNRADEVAREHDISYNEQLEAGDNPYLKYNHADAEFQEKLADDTSFGGNLGKAVFQAKKRVLEPFGLVEEGAKTAPTGKRIDDHFPKRKKARTEEDSKPSTSSDAEAGPSGSQQLQIPAQPASSLGADTMSAGGGGPLGDNNQGADGVGNASGDWHCDSTWMGDRVVTKSTRTWVLPSYNNHQYREIKSGSVDGSNANAYFGYSTPWGYFDFNRFHSHWSPRDWQRLINNYWGFRPRSLRVKIFNIQVKEVTVQDSTTTIANNLTSTVQVFTDDDYQLPYVVGNGTEGCLPAFPPQVFTLPQYGYATLNRDNTENPTERSSFFCLEYFPSKMLRTGNNFEFTYNFEEVPFHSSFAPSQNLFKLANPLVDQYLYRFVSTNNTGGVQFNKNLAGRYANTYKNWFPGPMGRTQGWNLGSGVNRASVSAFATTNRMELEGASYQVPPQPNGMTNNLQGSNTYALENTMIFNSQPANPGTTATYLEGNMLITSESETQPVNRVAYSVGGQMATNNQSSTTAPTTGTYNLQEIVPGSVWMERDVYLQGPIWAKIPETGAHFHPSPAMGGFRLKHPPPMMLIKNTPVPGNITSFSDVPVSSFITQYSTGQVTVEMEWELKKENSKRWNPEIQYTNNYNDPQFVDFAPDSTGEYRTTRPIGTRYLTRPL

SEQ ID NO: 660 - DNA, 2211 bp, Artificial Sequence
  Description of Artificial Sequence: Synthetic polynucleotide
atggctgctgacggttatcttccagattggctcgaggacaacctttctgaaggcattcgtgagtggtgggctctgaaacctggagtccctcaacccaaagcgaaccaacaacaccaggacaaccgtcggggtcttgtgcttccgggttacaaatacctcggacccggtaacggactcgacaaaggagagccggtcaacgaggcggacgcggcagccctcgaacacgacaaagcttacgaccagcagctcaaggccggtgacaacccgtacctcaagtacaaccacgccgacgccgagtttcaggagcgtcttcaagaagatacgtcttttgggggcaaccttggcagagcagtcttccaggccaaaaagaggatccttgagcctcttggtctggttgaggaagcagctaaaacggctcctggaaagaagaggcctgtagatcagtctcctcaggaaccggactcatcatctggtgttggcaaatcgggcaaacagcctgccagaaaaagactaaatttcggtcagactggcgactcagagtcagtcccagaccctcaacctctcggagaaccaccagcagcccccacaagtttgggatctaatacaatggcttcaggcggtggcgcaccaatggcagacaataacgagggtgccgatggagtgggtaattcctcaggaaattggcattgcgattcccaatggctgggcgacagagtcatcaccaccagcaccagaacctgggccctgcccacttacaacaaccatctctacaagcaaatctccggccaatcaggagcttcaaacgacaaccactactttggctacagcaccccttgggggtattttgactttaacagattccactgccacttctcaccacgtgactggcagcgactcattaacaacaactggggattccggcccaagaaactcagcttcaagctcttcaacatccaagttaaagaggtcacgcagaacgatggcacgacgactattgccaataaccttaccagcacggttcaagtgtttacggactcggagtatcagctcccgtacgtgctcgggtcggcgcaccaaggctgtctcccgccgtttccagcggacgtcttcatggtccctcagtatggatacctcaccctgaacaacggaagtcaagcggtgggacgctcatccttttactgcctggagtacttcccttcgcagatgctaaggactggaaataacttccaattcagctataccttcgaggatgtaccttttcacagcagctacgctcacagccagagtttggatcgcttgatgaatcctcttattgatcagtatctgtactacctgaacagaacgcaaggaacaacctctggaacaaccaaccaatcacggctgctttttagccaggctgggcctcagtctatgtctttgcaggccagaaattggctacctgggccctgctaccggcaacagagactttcaaagactgctaacggcaacaacaacagtaactttccttggacagcggccagcaaatatcatctcaatggccgcgactcgctggtgaatccaggaccagctatggccagtcacaaggacgatgaagaaaaatttttccctatgcacggcaatctaatatttggcaaagaagggacaacggcaagtaacgcagaattagataatgtaatgattacggatgaagaagagattcgtaccaccaatcctgtggcaacagagcagtgtggaactgtggcaaataacttgcagagctcaaatacagctcccacgactagaactgtcaatgatcagggggccttacctggcatggtgtggcaagatcgtgacgtgtaccttcaaggacctatctgggcaaagattcctcacacggatggacactttcatccttctcctctgatgggaggctttggactgaaacatccgcctcctcaaatcatgatcaaaaatactccggtaccggcaaatcctccgacgactttcagcccggccaagtttgcttcatttatcactcagtactccactggacaggtcagcgtggaaattgagtgggagctacagaaagaaaacagcaaacgttggaatccagagattcagtacacttccaactacaacaagtctgttaatgtggactttactgtagacactaatggtgtttatagtgaacctcgccctattggaacccggtatctcacacgaaacttgtaa

SEQ ID NO: 661 - protein, 736 aa, Artificial Sequence
  Description of Artificial Sequence: Synthetic polypeptide
MAADGYLPDWLEDNLSEGIREWWALKPGVPQPKANQQHQDNRRGLVLPGYKYLGPGNGLDKGEPVNEADAAALEHDKAYDQQLKAGDNPYLKYNHADAEFQERLQEDTSFGGNLGRAVFQAKKRILEPLGLVEEAAKTAPGKKRPVDQSPQEPDSSSGVGKSGKQPARKRLNFGQTGDSESVPDPQPLGEPPAAPTSLGSNTMASGGGAPMADNNEGADGVGNSSGNWHCDSQWLGDRVITTSTRTWALPTYNNHLYKQISGQSGASNDNHYFGYSTPWGYFDFNRFHCHFSPRDWQRLINNNWGFRPKKLSFKLFNIQVKEVTQNDGTTTIANNLTSTVQVFTDSEYQLPYVLGSAHQGCLPPFPADVFMVPQYGYLTLNNGSQAVGRSSFYCLEYFPSQMLRTGNNFQFSYTFEDVPFHSSYAHSQSLDRLMNPLIDQYLYYLNRTQGTTSGTTNQSRLLFSQAGPQSMSLQARNWLPGPCYRQQRLSKTANGNNNSNFPWTAASKYHLNGRDSLVNPGPAMASHKDDEEKFFPMHGNLIFGKEGTTASNAELDNVMITDEEEIRTTNPVATEQCGTVANNLQSSNTAPTTRTVNDQGALPGMVWQDRDVYLQGPIWAKIPHTDGHFHPSPLMGGFGLKHPPPQIMIKNTPVPANPPTTFSPAKFASFITQYSTGQVSVEIEWELQKENSKRWNPEIQYTSNYNKSVNVDFTVDTNGVYSEPRPIGTRYLTRNL

SEQ ID NO: 662 - DNA, 2208 bp, Artificial Sequence
  Description of Artificial Sequence: Synthetic polynucleotide
atggctgccgatggttatcttccagattggctcgaggacaacctctctgagggcattcgcgagtggtgggacttgaaacctggagccccgaagcccaaagccaaccagcaaaagcaggacgacggccggggtctggtgcttcctggctacaagtacctcggacccttcaacggactcgacaagggggagcccgtcaacgcggcggacgcagcggccctcgagcacgacaaggcctacgaccagcagctcaaagcgggtgacaatccgtacccgcggtataaccacgccgacgccgagtttcaggagcgtctgcaagaagatacgtcttttgggggcaacctcgggcgagcagtcttccaggccaagaagcgggttctcgaacctctcggtctggttggggaaggcgctaagacggctcctggaaagaaacgtccggtagagcagtcgccacaagagccagactcctcctcgggcatcggcaagacaggccagcagcccgctaaaaagagactcaattttggtcagactggcgactcagagtcagtccccgatccacaacctctcggagaacctccagcaacccccgctgctgtgggacctactacaatggcttcaggcggtggcgcaccaatggcagacaataacgaaggcgccgacggagtgggtaatgcctcaggaaattggcattgcgattccacatggctgggcgacagagtcatcaccaccagcacccgcacctgggccttgcccacctacaataaccacctctacaagcaaatctccagtgcttcaacgggggccagcaacgacaaccactacttcggctacagcaccccctgggggtattttgatttcaacagattccactgccacttttcaccacgtgactggcagcgactcatcaacaacaattggggattccggcccaagagactcaacttcaaactcttcaacatccaagtcaaggaggtcacgacgaatgatggcgtcacaaccatcgctaataaccttaccagcacggttcaagtcttctcggactcggagtaccagcttccgtacgtcctcggctctgcgcaccagggctgcctccctccgttcccggcggacgtgttcatgattccgcaatacggctacctgacgctcaacaatggcagccaagccgtgggacgttcatccttttactgcctggaatatttcccttctcagatgctgagaacgggcaacaactttaccttcagctacacctttgaggaagtgcctttccacagcagctacgcgcacagccagagcctggaccggctgatgaatcctcccatcgaccaatacctgtattacctgaacagaactcaaaatcagtccggaagtgcccaaaacaaggacttgctgtttagccgtgggtctccagctggcatgtctgttcagcccaaaaactggctacctggaccctgttatcggcagcagcgcgtttctaaaacaaaaacagacaacaacaacagcaattttacctggactggtgcttcaaaatataacctcaatgggcgtgaatccatcatcaaccctggcactgctatggcctcacacaaagacgacgaagacaagttctttcccatgagcggtgtcatgatttttggaaaagagagcgccggagcttcaaacactgcattggacaatgtcatgattacagacgaagaggaaattaaagccactaaccctgtggccaccgaaagatttgggaccgtggcagtcaatttccagagcagcagcacagaccctgcgaccggagatgtgcatgctatgggagcattacctggcatggtgtggcaagatagagacgtgtacctgcagggtcccatttgggccaaaattcctcacacagatggacactttcacccgtctcctcttatgggcggctttggactcaagaacccgcctcctcagatcctcatcaaaaacacgcctgttcctgcgaatcctccggcggagttttcagctacaaagtttgcttcattcatcacccaatactccacaggacaagtgagtgtggaaattgaatgggagctgcagaaagaaaacagcaagcgctggaatcccgaagtgcagtacacatccaattatgcaaaatctgccaacgttgattttactgtggacaacaatggactttatactgagcctcgccccattggcacccgttaccttacccgtcccctg

SEQ ID NO: 663 - protein, 736 aa, Artificial Sequence
  Description of Artificial Sequence: Synthetic polypeptide
MAADGYLPDWLEDNLSEGIREWWDLKPGAPKPKANQQKQDDGRGLVLPGYKYLGPFNGLDKGEPVNAADAAALEHDKAYDQQLKAGDNPYPRYNHADAEFQERLQEDTSFGGNLGRAVFQAKKRVLEPLGLVGEGAKTAPGKKRPVEQSPQEPDSSSGIGKTGQQPAKKRLNFGQTGDSESVPDPQPLGEPPATPAAVGPTTMASGGGAPMADNNEGADGVGNASGNWHCDSTWLGDRVITTSTRTWALPTYNNHLYKQISSASTGASNDNHYFGYSTPWGYFDFNRFHCHFSPRDWQRLINNNWGFRPKRLNFKLFNIQVKEVTTNDGVTTIANNLTSTVQVFSDSEYQLPYVLGSAHQGCLPPFPADVFMIPQYGYLTLNNGSQAVGRSSFYCLEYFPSQMLRTGNNFTFSYTFEEVPFHSSYAHSQSLDRLMNPPIDQYLYYLNRTQNQSGSAQNKDLLFSRGSPAGMSVQPKNWLPGPCYRQQRVSKTKTDNNNSNFTWTGASKYNLNGRESIINPGTAMASHKDDEDKFFPMSGVMIFGKESAGASNTALDNVMITDEEEIKATNPVATERFGTVAVNFQSSSTDPATGDVHAMGALPGMVWQDRDVYLQGPIWAKIPHTDGHFHPSPLMGGFGLKNPPPQILIKNTPVPANPPAEFSATKFASFITQYSTGQVSVEIEWELQKENSKRWNPEVQYTSNYAKSANVDFTVDNNGLYTEPRPIGTRYLTRPL

SEQ ID NO: 664 - DNA, 2208 bp, Artificial Sequence
  Description of Artificial Sequence: Synthetic polynucleotide
atggctgccgatggttatcttccagattggctcgaggacaacctctctgagggcattcgcgagtggtgggacttgaaacctggagccccgaagcccaaagccaaccagcaaaagcaggacgacggccggggtctggtgcttcctggctacaagtacctcggacccttcaacggactcgacaagggggagcccgtcaacgcggcggacgcagcggccctcgagcacgacaaggcctacgaccagcagctcaaagcgggtgacaatccgtacctgcggtataaccacgccgacgccgagtttcaggagcgtctgcaagaagatacgtcttttgggggcaacctcgggcgagcagtcttccaggccaagaagcgggttctcgaacctctcggtctggttgaggaaggcgctaagacggctcctggaaagaaacgtccggtagagcagtcgccacaagagccagactcctcctcgggcatcggcaagacaggccagcagcccgctaaaaagagactcaattttggtcagactggcgactcagagtcagtccccgatccacgacctctcggagaacctccagcaacccccgctgctgtgggacctactacaatggcttcaggcggtggcgcaccaatggcagacaataacgaaggcgccgacggagtgggtaatgcctcaggaaattggcattgcgattccacatggctgggcgacagagtcatcaccaccagcacccgcacctgggccttgcccacctacaataaccacctctacaagcaaatctccagtgcttcaacgggggccagcaacgacaaccactacttcggctacagcaccccctgggggtattttgatttcaacagattccactgccacttttcaccacgcgactggcagcgactcatcaacaacaattggggattccggcccaagagactcaacttcaaactcttcaacatccaagtcaaggaggtcacgacgaatgatggcgtcacaaccatcgctaataaccttaccagcacggttcaagtcttctcggactcggagtaccagcttccgtacgtcctcggctctgcgcaccagggctgcctccctccgttcccggcggacgtgttcatgattccgcaatacggctacctgacgctcaacaatggcagccaagccgtgggacgttcatccttttactgcctggaatatttcccttctcagatgctgagaacgggcaacaactttaccttcagctacacctttgaggaagtgcctttccacagcagctacgcgcacagccagagcctggaccggctgatgaatcctctcatcgaccaatacctgtattacctgaacagaactcaaaatcagtccggaagtgcccaaaacaaggacttgctgtttagccgtgggcctccagctggcatgtctgttcagcccaaaaactggctacctggaccctgttatcggcagcagcgcgtttctaaaacaaaaacagacaacaacaacagcaattttacctggactggtgcttcaaaatataacctcaatgggcgtgaatccatcatcaaccctggcactgctatggcctcacacaaagacgacgaagacaagttctttcccatgagcggtgtcatgatttttggaaaagagagcgccggagcttcaaacactgcattggacaatgtcatgattacggacgaagaggaaattaaagccactaaccctgtggccaccgaaagatttgggaccgtggcagtcaatttccagagcagcagcacagaccctgcgaccggagatgtgcatgctatgggagcattacctggcatggtgtggcaagatagagacgtgtacctgcagggtcccatttgggccaaaattcctcacacagatggacactttcacccgtctcctcttatgggcggctttggactcaagaacccgcctcctcagatcctcatcaaaaacacgcctgttcctgcgaatcctccggcggagttttcagctacaaagtttgcttcattcatcacccaatactccacaggacaagtgagtgtggaaattgaatgggagctgcagaaagaaaacagcaagcgctggaatcccgaagtgcagtacacatccaattatgcaaaatctgccaacgttgattttactgtggacaacaatggactttatactgagcctcgccccattggcacccgttaccttacccgtcccctg

SEQ ID NO: 665 - protein, 736 aa, Artificial Sequence
  Description of Artificial Sequence: Synthetic polypeptide
MAADGYLPDWLEDNLSEGIREWWDLKPGAPKPKANQQKQDDGRGLVLPGYKYLGPFNGLDKGEPVNAADAAALEHDKAYDQQLKAGDNPYLRYNHADAEFQERLQEDTSFGGNLGRAVFQAKKRVLEPLGLVEEGAKTAPGKKRPVEQSPQEPDSSSGIGKTGQQPAKKRLNFGQTGDSESVPDPRPLGEPPATPAAVGPTTMASGGGAPMADNNEGADGVGNASGNWHCDSTWLGDRVITTSTRTWALPTYNNHLYKQISSASTGASNDNHYFGYSTPWGYFDFNRFHCHFSPRDWQRLINNNWGFRPKRLNFKLFNIQVKEVTTNDGVTTIANNLTSTVQVFSDSEYQLPYVLGSAHQGCLPPFPADVFMIPQYGYLTLNNGSQAVGRSSFYCLEYFPSQMLRTGNNFTFSYTFEEVPFHSSYAHSQSLDRLMNPLIDQYLYYLNRTQNQSGSAQNKDLLFSRGPPAGMSVQPKNWLPGPCYRQQRVSKTKTDNNNSNFTWTGASKYNLNGRESIINPGTAMASHKDDEDKFFPMSGVMIFGKESAGASNTALDNVMITDEEEIKATNPVATERFGTVAVNFQSSSTDPATGDVHAMGALPGMVWQDRDVYLQGPIWAKIPHTDGHFHPSPLMGGFGLKNPPPQILIKNTPVPANPPAEFSATKFASFITQYSTGQVSVEIEWELQKENSKRWNPEVQYTSNYAKSANVDFTVDNNGLYTEPRPIGTRYLTRPL

SEQ ID NO: 666 - DNA, 2208 bp, Artificial Sequence
  Description of Artificial Sequence: Synthetic polynucleotide
atggctgccgatggttatcttccagattggctcgaggacaacctctctgagggcattcgcgagtggtgggacttgaaacctggagccccgaagcccaaagccaaccagcaaaagcaggacgacggccggggtctggtgcttcctggctacaagtacctcggacccttcaacggactcgacaagggggagcccgtcaacgcggcggacgcagcggccctcgagcacgacaaggcctacgaccagcagctcaaagcgggtgacaatccgtacctgcggtataaccacgccgacgccgagtttcaggagcgtctgcaagaagatacgtcttttgggggcaacctcgggcgagcagtcttccaggccaagaagcgggttctcgaacctctcggtctggttgaggaaggcgctaagacggctcctggaaagaaacgtccggtagagcagtcgccacaagagccagactcctcctcgggcatcggcaagacaggccagcagcccgctaaaaagagactcaattttggtcagactggcggctcagagtcagtccccgatccacaacctctcggagaacctccagcaacccccgctgctgtgggacctactacaatggcttcaggcggtggcgcaccaatggcagacaataacgaaggcgccgacggagtgggtaatgcctcaggaaattggcattgcgattccacatggctgggcgacagagtcatcaccaccagcacccgcacctgggccttgcccacctacaataaccacctctacaagcaaatctccagtgcttcaacgggggccagcaacgacaaccactacttcggctacagcaccccctgggggtattttgatttcaacagattccactgccacttttcaccacgtgactggcagcgactcatcaacaacaattggggattccggcccaagagactcaacttcaaactcttcaacatccaagtcaaggaggtcacgacgaatgatggcgtcacaaccatcgctaataaccttaccagcacggttcaagtcttctcggactcggagtaccagcttccgtacgtcctcggctctgcgcaccagggctgcctccctccgttcccggcggacgtgttcatgattccgcaatacggctacctgacgctcaacaatggcagccaagccgtgggacgttcatccttttactgcctggaatatttcccttctcagatgctgagaacgggcaacaactttaccttcagctacacctttgaggaagtgcctttccacagcagctacgcgcacagccagagcctggaccggctgatgaatcctcccatcgaccaatacctgtattacctgaacagaactcaaaatcagtccgggagtgcccaaaacaaggacttgctgtttagccgtgggtctccagctggcatgtctgttcagcccaaaaactggctacctggaccctgttatcggcagcagcgcgtttctaaaacaaaaacagacaacaacaacagcaattttacctggactggtgcttcaaaatataacctcaatgggcgtgaatccatcatcaaccctggcactgctatggcctcacacaaagacgacgaagacaagttctttcccatgagcggtgtcatgatttttggaaaagagagcgccggagcttcaaacactgcattggacaatgtcatgattacagacgaagaggaaattaaagccactaaccctgtggccaccgaaagatttgggaccgtggcagtcaatttccagagcagcagcacagaccctgcgaccggagatgtgcatgctatgggagcattacctggcatggtgtggcaagatagagacgtgtacctgcagggtcccatttgggccaaaattcctcacacagatggacactttcacccgtctcctcttatgggcggctttggactcaagaacccgcctcctcagatcctcatcaaaaacacgcctgttcctgcgaatcctccggcggagttttcagctacaaagtttgcttcattcatcacccaatactccacaggacaagtgagtgtggaaattgaatgggagctgcagaaagaaaacagcaagcgctggaatcccgaagtgcagtacacatccaattatgcaaaatctgccaacgttgactttactgtggacaacaatggactttatactgagcctcgccccattggcacccgttaccttacccgtcccctg

SEQ ID NO: 667 - protein, 736 aa, Artificial Sequence
  Description of Artificial Sequence: Synthetic polypeptide
MAADGYLPDWLEDNLSEGIREWWDLKPGAPKPKANQQKQDDGRGLVLPGYKYLGPFNGLDKGEPVNAADAAALEHDKAYDQQLKAGDNPYLRYNHADAEFQERLQEDTSFGGNLGRAVFQAKKRVLEPLGLVEEGAKTAPGKKRPVEQSPQEPDSSSGIGKTGQQPAKKRLNFGQTGGSESVPDPQPLGEPPATPAAVGPTTMASGGGAPMADNNEGADGVGNASGNWHCDSTWLGDRVITTSTRTWALPTYNNHLYKQISSASTGASNDNHYFGYSTPWGYFDFNRFHCHFSPRDWQRLINNNWGFRPKRLNFKLFNIQVKEVTTNDGVTTIANNLTSTVQVFSDSEYQLPYVLGSAHQGCLPPFPADVFMIPQYGYLTLNNGSQAVGRSSFYCLEYFPSQMLRTGNNFTFSYTFEEVPFHSSYAHSQSLDRLMNPPIDQYLYYLNRTQNQSGSAQNKDLLFSRGSPAGMSVQPKNWLPGPCYRQQRVSKTKTDNNNSNFTWTGASKYNLNGRESIINPGTAMASHKDDEDKFFPMSGVMIFGKESAGASNTALDNVMITDEEEIKATNPVATERFGTVAVNFQSSSTDPATGDVHAMGALPGMVWQDRDVYLQGPIWAKIPHTDGHFHPSPLMGGFGLKNPPPQILIKNTPVPANPPAEFSATKFASFITQYSTGQVSVEIEWELQKENSKRWNPEVQYTSNYAKSANVDFTVDNNGLYTEPRPIGTRYLTRPL

SEQ ID NO: 668 - DNA, 2208 bp, Artificial Sequence
  Description of Artificial Sequence: Synthetic polynucleotide
atggctgccgatggttatcttccagattggctcgaggacaacctctctgagggcattcgcgagtggtgggacttgaaacctggagccccgaagcccaaagccaaccagcaaaagcaggacgacggccggggtctggtgcttcctggctacaagtacctcggacccttcaacggactcgacaagggggagcccgtcaacgcggcggacgcagcggccctcgagcacgacaaggcctacgaccagcagctcaaagcgggtgacaatccgtacctgcggtataaccacgccgacgccgagtttcaagagcgtctgcaagaagatacgtcttttgggggcaacctcgggcgagcagtcttccaggccaagaagcgggttctcgaacctctcggtctggttgaggaaggcgctaagacggctcctggaaagaaacgtccggtagagcagtcgccacaagagccagactcctcctcgggcatcggcaagacaggccagcagcccgctaaaaagagactcaattttggtcagactggcgactcagagtcagtccccgatccgcaacctctcggagaacctccagcaacccccgctgctgtgggacctactacaatggcttcaggcggtggcgcaccaatggcagacaataacgaaggcgccgacggagtgggtaatgcctcaggaaattggcattgcgattccacatggctgggcgacagagtcatcaccaccagcacccgcacctgggccttgcccacctacaataaccacctctacaagcaaatctccagtgcttcaacgggggccagcaacgacaaccactacttcggctacagcaccccctgggggtattttgatttcaacagattccactgccacttttcaccacgtgactggcagcgactcatcaacaacaattggggattccggcccaagagactcaacttcaaactcttcaacatccaagtcaaggaggtcacgacgaatgatggcgtcacaaccatcgctaataaccttaccagcacggttcaagtcttctcggactcggagtaccagcttccgtacgtcctcggctctgcgcaccagggctgcctccctccgttcccggcggacgtgttcatgattccgcaatacggctacctgacgctcaacaatggcagccaagccgtgggacgttcatccttttactgcctggaatatttcccttctcagatgctgagaacgggcaacaactttaccttcagctacacctttgaggaagtgcctttccacagcagctacgcgcacagccagagcctggaccggctgatgaatcctctcatcgaccaatacctgtattacctgaacagaactcaaaatcagtccggaagtgcccaaaacaaggacttgctgtttagccgtgggtctccagctggcatgtctgttcagcccaaaaactggctacctggaccctgttatcggcagcagcgcgtttctaaaacaaaaacagacaacaacaacagcaattttacctggactggtgcttcaaaatataacctcaatgggcgtgaatccatcatcaaccctggcactgctgtggcctcacacaaagacgacgaagacaagttctttcccatgagcggtgtcatgatttttggaaaagagagcgccggagcttcaaacactgcattggacaatgtcatgattacagacgaagaggaaattaaagccactaaccctgtggccaccgaaagatttgggaccgtggcagtcaatttccagagcagcagcacagaccctgcgaccggagatgtgcatgctatgggagcattacctggcatggtgtggcaagatagagacgtgtacctgcagggtcccatttgggccaaaattcctcacacagatggacactttcacccgtctcctcttatgggcggctttggactcaagaacccgcctcctcagatcctcatcaaaaacacgcctgttcctgcgaatcctccggcggagttttcagctacaaagtttgcttcattcatcacccaatactccacaggacaagtgagtgtggaaattgaatgggagctgcagaaagaaaacagcaagcgctggaatcccgaagtgcagtacacatccaattatgcaaaatctgccaacgttgattttactgtggacaacaatggactttatactgagcctcgccccattggcacccgttaccttacccgtcccctg

SEQ ID NO: 669 - protein, 736 aa, Artificial Sequence
  Description of Artificial Sequence: Synthetic polypeptide
MAADGYLPDWLEDNLSEGIREWWDLKPGAPKPKANQQKQDDGRGLVLPGYKYLGPFNGLDKGEPVNAADAAALEHDKAYDQQLKAGDNPYLRYNHADAEFQERLQEDTSFGGNLGRAVFQAKKRVLEPLGLVEEGAKTAPGKKRPVEQSPQEPDSSSGIGKTGQQPAKKRLNFGQTGDSESVPDPQPLGEPPATPAAVGPTTMASGGGAPMADNNEGADGVGNASGNWHCDSTWLGDRVITTSTRTWALPTYNNHLYKQISSASTGASNDNHYFGYSTPWGYFDFNRFHCHFSPRDWQRLINNNWGFRPKRLNFKLFNIQVKEVTTNDGVTTIANNLTSTVQVFSDSEYQLPYVLGSAHQGCLPPFPADVFMIPQYGYLTLNNGSQAVGRSSFYCLEYFPSQMLRTGNNFTFSYTFEEVPFHSSYAHSQSLDRLMNPLIDQYLYYLNRTQNQSGSAQNKDLLFSRGSPAGMSVQPKNWLPGPCYRQQRVSKTKTDNNNSNFTWTGASKYNLNGRESIINPGTAVASHKDDEDKFFPMSGVMIFGKESAGASNTALDNVMITDEEEIKATNPVATERFGTVAVNFQSSSTDPATGDVHAMGALPGMVWQDRDVYLQGPIWAKIPHTDGHFHPSPLMGGFGLKNPPPQILIKNTPVPANPPAEFSATKFASFITQYSTGQVSVEIEWELQKENSKRWNPEVQYTSNYAKSANVDFTVDNNGLYTEPRPIGTRYLTRPL

SEQ ID NO: 670 - DNA, 2208 bp, Artificial Sequence
  Description of Artificial Sequence: Synthetic polynucleotide
atggctgccgatggttatcttccagattggctcgaggacaacctctctgagggcattcgcgagtggtgggacttgaaacctggagccccgaagcccaaagccaaccagcaaaagcaggacgacggccggggtctggtgcttcctggctacaagtacctcggacccttcaacggactcgacaagggggagcccgtcaacgcggcggacgcagcggccctcgagcacgacaaggcctacgaccagcagctcaaagcgggtgacaatccgtacctgcggtataaccacgccgacgccgagtttcaggagcgtctgcaagaagatacgtcttttgggggcaacctcgggcgagcagtcttccaggccaagaagcgggttctcgaacctctcggtctggttgaggaaggcgctaagacggctcctggaaagaaacgtccggtagagcagtcgccacaagagccagactcctcctcgggcatcggcaagacaggccagcagcccgctaaaaagagactcaattttggtcagactggcgactcagagtcagtccccgatccacaacctctcggagaacctccagcaacccccgctgctgtgggacctactacaatggcttcaggcggtggcgcaccaatggcagacaataacgaaggcgccgacggagtgggtaatgcctcaggaaattggcattgcgattccacatggctgggcgacagagtcatcaccaccagcacccgcacctgggccttgcccacctacaataaccacctctacaagcaaatctccagtgcttcaacgggggccagcaacgacaaccactacttcggctacagcaccccctgggggtattttgatttcaacagattccactgccacttttcaccacgtgactggcagcaactcatcaacaacaattggggattccggcccaagagactcaacttcaaactcttcaacatccaagtcaaggaggtcacgacgaatgatggcgtcacaaccatcgctaataaccttaccagcacggttcaagtcttctcggactcggagtaccagcttccgtacgtcctcggctctgcgcaccagggctgcctccctccgttcccggcggacgtgttcatgattccgcaatacggctacctgacgctcaacaatggcagccaagccgtgggacgttcatccttttactgcctggaatatttcccttctcagatgctgagaacgggcaacaactttaccttcagctacacctttgaggaagtgcctttccacagcagctacgcgcacagccagagcctggaccggctgatgaatcctctcatcgaccaatacctgtattacctgaacagaactcaaaatcagtccggaagtgcccaaaacaaggacttgctgtttagccgtgggtctccagctggcatgtctgttcagcccaaaaactggctacctggaccctgttatcggcagcagcgcgtttctaaaacaaaaacagacaacaacaacagcaattttacctggactggtgcttcaaaatataacctcaatgggcgtgaatccatcatcaaccctggcactgctatggcctcacacaaagacgacgaagacaagttctttcccatgagcggtgtcatgatttttggaaaagagagcgccggagcttcaaacactgcattggacaatgtcatgattacagacgaagaggaaattaaagccactaaccctgtggccaccgaaagatttgggaccgtggcagtcaatttccagagcaccagcacagaccctgcgaccggagatgtgcatgctatgggagcattacctggcatggtgtggcaagatagagacgtgtacctgcagggtcccatttgggccaaaattcctcacacagatggacactttcacccgtctcctcttatgggcggctttggactcaagaacccgcctcctcagatcctcatcaaaaacacgcctgttcctgcgaatcctccggcggagttttcagctacaaagtttgcttcattcatcacccaatactccacaggacaagtgagtgtggaaattgaatgggagctgcagaaagaaaacagcaagcgctggaatcccgaagtgcagtacacatccaattatgcaaaatctgccgacgttgattttactgtggacaacaatggactttatactgagcctcgccccattggcacccgttaccttacccgtcccctg

SEQ ID NO: 671 - protein, 736 aa, Artificial Sequence
  Description of Artificial Sequence: Synthetic polypeptide
MAADGYLPDWLEDNLSEGIREWWDLKPGAPKPKANQQKQDDGRGLVLPGYKYLGPFNGLDKGEPVNAADAAALEHDKAYDQQLKAGDNPYLRYNHADAEFQERLQEDTSFGGNLGRAVFQAKKRVLEPLGLVEEGAKTAPGKKRPVEQSPQEPDSSSGIGKTGQQPAKKRLNFGQTGDSESVPDPQPLGEPPATPAAVGPTTMASGGGAPMADNNEGADGVGNASGNWHCDSTWLGDRVITTSTRTWALPTYNNHLYKQISSASTGASNDNHYFGYSTPWGYFDFNRFHCHFSPRDWQQLINNNWGFRPKRLNFKLFNIQVKEVTTNDGVTTIANNLTSTVQVFSDSEYQLPYVLGSAHQGCLPPFPADVFMIPQYGYLTLNNGSQAVGRSSFYCLEYFPSQMLRTGNNFTFSYTFEEVPFHSSYAHSQSLDRLMNPLIDQYLYYLNRTQNQSGSAQNKDLLFSRGSPAGMSVQPKNWLPGPCYRQQRVSKTKTDNNNSNFTWTGASKYNLNGRESIINPGTAMASHKDDEDKFFPMSGVMIFGKESAGASNTALDNVMITDEEEIKATNPVATERFGTVAVNFQSTSTDPATGDVHAMGALPGMVWQDRDVYLQGPIWAKIPHTDGHFHPSPLMGGFGLKNPPPQILIKNTPVPANPPAEFSATKFASFITQYSTGQVSVEIEWELQKENSKRWNPEVQYTSNYAKSADVDFTVDNNGLYTEPRPIGTRYLTRPL

SEQ ID NO: 672 - DNA, 2208 bp, Artificial Sequence
  Description of Artificial Sequence: Synthetic polynucleotide
atggctgccgatggttatcttccagattggctcgaggacaacctctctgagggcattcgcgagtggtgggacttgaaacctggagccccgaagcccaaagccaaccagcaaaagcaggacgacggccggggtctggtgcttcctggctacaagtacctcggacccttcaacggactcgacaagggggagcccgtcaacgcggcggacgcagcggccctcgagcacgacaaggcctacgaccagcagctcaaagcgggtgacaatccgtacctgcggtataaccacgccgacgccgagtttcaagagcgtctgcaagaagatacgtcttttgggggcaacctcgggcgagcagtcttccaggccaagaagcgggttctcgaacctctcggtctggttgaggaaggcgctaagacggctcctggaaagaaacgtccggtagagcagtcgccacaagagccagactcctcctcgggcatcggcaagacaggccagcagcccgctaaaaagagactcaattttggtcagactggcgactcagagtcagtccccgatccgcaacctctcggagaacctccagcaacccccgctgctgtgggacctactacaatggcttcaggcggtggcgcaccaatggcagacaataacgaaggcgccgacggagtgggtaatgcctcaggaaattggcattgcgattccacatggctgggcgacagagtcatcaccaccagcacccgcacctgggccttgcccacctacaataaccacctctacaagcaaatctccagtgcttcaacgggggccagcaacgacaaccactacttcggctacagcaccccctgggggtattttgatttcaacagattccactgccacttttcaccacgtgactggcagcgactcatcaacaacaattggggattccggcccaagagactcaacttcaaactcttcaacatccaagtcaaggaggtcacgacgaatgatggcgtcacaaccatcgctaataaccttaccagcacggttcaagtcttctcggactcggagtaccagcctccgtacgtcctcggctctgcgcaccagggctgcctccctccgttcccggcggacgtgttcatgattccgcaatacggccacctgacgctcaacaatggcagccaagccgtgggacgttcatccttttactgcctggaatatttcccttctcagatgctgagaacgggcaacaactttaccttcagctacacctttgaggaagtgcctttccacagcagctacgcgcacagccagagcctggaccggctgacgaatcctctcatcgaccaatacctgtattacctgaacagaactcaaaatcagtccggaagtgcccaaaacaaggacttgctgtttagccgtgggtctccagctggcatgtctgttcagcccaaaaactggctacctggaccctgttatcggcagcagcgcgtttctaaaacaaaaacagacaacaacaacagcaattttacctggactggtgcttcaaaatataacctcaatgggcgtgaatccatcatcaaccctggcactgctatggcctcacacaaagacgacgaagacaagttctttcccatgagcggtgtcatgatttttggaaaagagagcgccggagcttcaaacactgcattggacaatgtcatgattacagacgaagaggaaattaaagccactaaccctgtggccaccgaaagatttgggaccgtggcagtcaatttccagagcagcagcacagaccctgcgaccggagatgtgcatgctatgggagcattacctggcatggtgtggcaagatagagacgtgtacctgcagggtcccatttgggccaaaattcctcacacagatggacactttcacccgtctcctcttatgggcggctttggactcaagaacccgcctcctcagatcctcatcaaaaacacgcctgttcctgcgaatcctccggcggagttttcagctacaaagtttgcttcattcatcacccaatactccacaggacaagtgagtgtggaaattgaatgggagctgcagaaagaaaacagcaagcgctggaatcccgaagtgcagtacacatccaattatgcaaaatctgccaacgttgattttactgtggacaacaatggactttatactgagcctcgccccattggcacccgttaccttacccgtcccctg

SEQ ID NO: 673 - protein, 736 aa, Artificial Sequence
  Description of Artificial Sequence: Synthetic polypeptide
MAADGYLPDWLEDNLSEGIREWWDLKPGAPKPKANQQKQDDGRGLVLPGYKYLGPFNGLDKGEPVNAADAAALEHDKAYDQQLKAGDNPYLRYNHADAEFQERLQEDTSFGGNLGRAVFQAKKRVLEPLGLVEEGAKTAPGKKRPVEQSPQEPDSSSGIGKTGQQPAKKRLNFGQTGDSESVPDPQPLGEPPATPAAVGPTTMASGGGAPMADNNEGADGVGNASGNWHCDSTWLGDRVITTSTRTWALPTYNNHLYKQISSASTGASNDNHYFGYSTPWGYFDFNRFHCHFSPRDWQRLINNNWGFRPKRLNFKLFNIQVKEVTTNDGVTTIANNLTSTVQVFSDSEYQPPYVLGSAHQGCLPPFPADVFMIPQYGHLTLNNGSQAVGRSSFYCLEYFPSQMLRTGNNFTFSYTFEEVPFHSSYAHSQSLDRLTNPLIDQYLYYLNRTQNQSGSAQNKDLLFSRGSPAGMSVQPKNWLPGPCYRQQRVSKTKTDNNNSNFTWTGASKYNLNGRESIINPGTAMASHKDDEDKFFPMSGVMIFGKESAGASNTALDNVMITDEEEIKATNPVATERFGTVAVNFQSSSTDPATGDVHAMGALPGMVWQDRDVYLQGPIWAKIPHTDGHFHPSPLMGGFGLKNPPPQILIKNTPVPANPPAEFSATKFASFITQYSTGQVSVEIEWELQKENSKRWNPEVQYTSNYAKSANVDFTVDNNGLYTEPRPIGTRYLTRPL

SEQ ID NO: 674 - DNA, 2208 bp, Artificial Sequence
  Description of Artificial Sequence: Synthetic polynucleotide
atggctgccgatggttatcttccagattggctcgaggacaacctctctgagggcattcgcgagtggtgggacttgaaacctggagccccgaagcccaaagccaaccagcaagagcaggacgacggccggggtctggtgcttcctggctacaagtacctcggacccttcaacggactcgacaagggggagcccgtcaacgcggcggacgcagcggccctcgagcacgacaaggcctacgaccagcagctcaaagcgggtgacaatccgtacctgcggtataaccacgccgacgccgagtttcaggagcgtctgcaagaagatacgtcttttgggggcaacctcgggcgagcagtcttccaggccaagaagcgggttctcgaacctctcggtctggttgaggaaggcgctaagacggctcctggaaagaaacgtccggtagagcagtcgccacaagagccagactcctcctcgggcatcggcaagacaggccagcagcccgctaaaaagagactcaattttggtcagactggcgactcagagtcagtccccgatccacaacctctcggagaacctccagcaacccccgctgctgtgggacctactacaatggcttcaggcggtggcgcaccaatggcagacaataacgaaggcgccgacggagtgggtaatgcctcaggaaattggcattgcgattccacatggctgggcgacagagtcatcaccaccagcacccgcacctgggccttgcccacctacaataaccacctctacaagcaaatctccagtgcttcaacgggggccagcaacgacaaccactacttcggctacagcaccccctgggggtattttgatttcaacagattccactgccacttttcaccacgtgactggcagcgactcatcaacaacaattggggattccggcccaagagactcaacttcaaactcttcaacatccaagtcaaggaggtcacgacgaatgatggcgtcacaaccatcgctaataaccttaccagcacggttcaagtcttctcggactcggagtaccagcttccgtacgtcctcggctctgcgcaccagggctgcctccctccgttcccggcggacgtgttcatgattccgcaatacggctacctgacgctcaacaatggcagccaagccgtgggacgttcatccttttactgcctggaatatttcccttctcagatgctgagaacgggcaacaactttaccttcagctacacctttgaggaagtgcctttccacagcagctacgcgcacagccagagcctggaccggctgatgaatcctctcatcgaccaatacctgtattacctgaacagaactcaaaatcagtccggaagtgcccaaaacaaggacttgctgtttagccgtgggtctccagctggcatgtctgttcagcccaaaaactggctacctggaccctgttatcggcagcagcgcgtttctaaaacaaaaacagacaacaacaacagcaattttacctggactggtgcttcaaaatataacctcaatgggcgtgaatccatcatcaaccctggcactgctatggcctcacacaaagacgacgaagacaagttctttcccatgagcggtgtcatgatttttggaaaagagagcgccggagcttcaaacactgcattggacaatgtcatgattacagacgaagaggaaattaaagccactaaccctgtggccaccgaaagatttgggaccgtggcagtcaatttccagagcagcagcacagaccctgcgaccggagatgtgcatgctacgggaacattacctggcatggtgtggcaagatagagacgtgtacctgcagggtcccatttgggccaaaattcctcacacagatggacactttcacccgtctcctcttatgggcggctttggactcaagaacccgcctcctcagatcctcatcaaaaccacgcctgttcctgcgaatcctccggcggagttttcagctacaaagtttgcttcattcatcacccagtactccacaggacaagtgagtgtggaaattgaatgggagctgcagaaagaaaacagcaagcgctggaatcccgaagtgcagtacacatccaattatgcaaaatctgccaacgttgattttactgtggacgacaatggactttatactgagcctcgccccattggcacccgttaccttacccgtcccctg

SEQ ID NO: 675 - protein, 736 aa, Artificial Sequence
  Description of Artificial Sequence: Synthetic polypeptide
MAADGYLPDWLEDNLSEGIREWWDLKPGAPKPKANQQEQDDGRGLVLPGYKYLGPFNGLDKGEPVNAADAAALEHDKAYDQQLKAGDNPYLRYNHADAEFQERLQEDTSFGGNLGRAVFQAKKRVLEPLGLVEEGAKTAPGKKRPVEQSPQEPDSSSGIGKTGQQPAKKRLNFGQTGDSESVPDPQPLGEPPATPAAVGPTTMASGGGAPMADNNEGADGVGNASGNWHCDSTWLGDRVITTSTRTWALPTYNNHLYKQISSASTGASNDNHYFGYSTPWGYFDFNRFHCHFSPRDWQRLINNNWGFRPKRLNFKLFNIQVKEVTTNDGVTTIANNLTSTVQVFSDSEYQLPYVLGSAHQGCLPPFPADVFMIPQYGYLTLNNGSQAVGRSSFYCLEYFPSQMLRTGNNFTFSYTFEEVPFHSSYAHSQSLDRLMNPLIDQYLYYLNRTQNQSGSAQNKDLLFSRGSPAGMSVQPKNWLPGPCYRQQRVSKTKTDNNNSNFTWTGASKYNLNGRESIINPGTAMASHKDDEDKFFPMSGVMIFGKESAGASNTALDNVMITDEEEIKATNPVATERFGTVAVNFQSSSTDPATGDVHATGTLPGMVWQDRDVYLQGPIWAKIPHTDGHFHPSPLMGGFGLKNPPPQILIKTTPVPANPPAEFSATKFASFITQYSTGQVSVEIEWELQKENSKRWNPEVQYTSNYAKSANVDFTVDDNGLYTEPRPIGTRYLTRPL

SEQ ID NO: 676 - DNA, 2208 bp, Artificial Sequence
  Description of Artificial Sequence: Synthetic polynucleotide
atggctgccgatggttatcttccagattggctcgaggacaacctctctgagggcattcgcgagtggtgggacttgaaacctggagccccgaagcccaaagccaaccagcaaaagcaggacgacggccggggtctggtgcttcctggctacaagtacctcggacccttcaacggactcgacaagggggagcccgtcaacgcggcggacgcagcggccctcgagcacgacaaggcctacgaccagcagctcaaagcgggtgacaatccgtacctgcggtataaccacgccgacgccgagtttcaggagcgtctgcaagaagatacgtcttttgggggcaacctcgggcgagcagtcttccaggccaagaagcgggttctcgaacctctcggtctggttgaggaaggcgctaagacggctcctggaaagaaacgtccggtagagcagtcgctacaagagccagactcctcctcgggcatcggcaagacaggccagcagcccgctaaaaagagactcaattttggtcagactggcgactcagagtcagtccccgatccacaacctctcggagaacctccagcaacccccgctgctgtgggacctactacaatggcttcaggcggtggcgcaccaatggcagacaataacgaaggcgccgacggagtgggtaatgcctcaggaaattggcattgcgattccacatggctgggcgacagagtcatcaccaccagcacccgcacctgggccttgcccacctacaataaccacctctacaagcaaatctccagtgcttcaacgggggccagcaacgacaaccactacttcggctacagcaccccctgggggtattttgatttcaacagattccactgccacttttcaccacgtgactggcagcgactcatcaacaacaattggggattccggcccaagagactcaacttcaaactcttcaacatccaagtcaaggaggtcacgacgaatgatggcgtcacaaccatcgctaataaccttaccagcacggttcaagtcttctcggactcggagtaccagcttccgtacgtcctcggctctgcgcaccagggctgcctccctccgttcccggcggacgtgttcatgattccgcaatacggctacctgacgctcaacaatggcagccaagccgtgggacgttcatccttttactgcctggaatatttcccttctcagatgctgagaacgggcaacaactttaccttcagctacacctttgaggaagtgcctttccacagcagctacgcgcacagccagagcctggaccggctgatgaatcctctcatcgaccaatacctgtattacctgaacagaactcaaaatcagtccggaagtgcccaaaacaaggacttgctgtttagccgtgggtctccagctggcatgtctgttcagcccaaaaactggctacctggaccctgttatcggcagcagcgcgtttctaaaacaaaaacagacaacgacaacagcaattttacctggactggtgcttcaaaatataacctcaatgggcgtgaatccatcatcaaccctggcactgctatggcctcacacaaagacgacgaagacaagttctttcccatgagcggtgtcatgatttttggaaaagagagcgccggagcttcaaacactgcattggacaatgtcatgattacagacgaagaggaaattaaagccactaaccctgtggccaccgaaagatttgggaccgtggcagtcaatttccagagcagcagcacagaccctgcgaccggagatgtgcatgctatgggagcattacctggcatggtgtggcaagatagagacgtgtacctgcagggtcccatttgggccaaaattcctcacacagatggacactttcacccgtctcctcttatgggcggctttggactcaagaacccgcctcctcagatcctcatcaaaaacacgcctgttcctgcgaatcctccggcggagttttcagctacaaagtttgcttcattcatcacccaatactccacaggacaagtgagtgtggaaattgaatgggagctgcagaaagaaaacagcaagcgctggaatcccgaagtgcagtacacatccaattatgcaaaatctgccaacgttgattttactgtggacaacaatggactttatactgagcctcgccccattggcacccgttaccttacccgtcccctg

SEQ ID NO: 677 - protein, 736 aa, Artificial Sequence
  Description of Artificial Sequence: Synthetic polypeptide
MAADGYLPDWLEDNLSEGIREWWDLKPGAPKPKANQQKQDDGRGLVLPGYKYLGPFNGLDKGEPVNAADAAALEHDKAYDQQLKAGDNPYLRYNHADAEFQERLQEDTSFGGNLGRAVFQAKKRVLEPLGLVEEGAKTAPGKKRPVEQSLQEPDSSSGIGKTGQQPAKKRLNFGQTGDSESVPDPQPLGEPPATPAAVGPTTMASGGGAPMADNNEGADGVGNASGNWHCDSTWLGDRVITTSTRTWALPTYNNHLYKQISSASTGASNDNHYFGYSTPWGYFDFNRFHCHFSPRDWQRLINNNWGFRPKRLNFKLFNIQVKEVTTNDGVTTIANNLTSTVQVFSDSEYQLPYVLGSAHQGCLPPFPADVFMIPQYGYLTLNNGSQAVGRSSFYCLEYFPSQMLRTGNNFTFSYTFEEVPFHSSYAHSQSLDRLMNPLIDQYLYYLNRTQNQSGSAQNKDLLFSRGSPAGMSVQPKNWLPGPCYRQQRVSKTKTDNDNSNFTWTGASKYNLNGRESIINPGTAMASHKDDEDKFFPMSGVMIFGKESAGASNTALDNVMITDEEEIKATNPVATERFGTVAVNFQSSSTDPATGDVHAMGALPGMVWQDRDVYLQGPIWAKIPHTDGHFHPSPLMGGFGLKNPPPQILIKNTPVPANPPAEFSATKFASFITQYSTGQVSVEIEWELQKENSKRWNPEVQYTSNYAKSANVDFTVDNNGLYTEPRPIGTRYLTRPL

SEQ ID NO: 678 - DNA, 2208 bp, Artificial Sequence
  Description of Artificial Sequence: Synthetic polynucleotide
atggctgccgatggttatcttccagattggctcgaggacaacctctctgagggcattcgcgagtggtgggacttgaaacctggagccccgaaacctaaagccaaccagcaaaagcaggacgacggccggggtctggtgcttcctggctacaagtacctcggacccttcaacggactcgacaagggggagcccgtcaacgcggcggacgcagcggccctcgagcacgacaaggcctacgaccagcagctcaaagcgggtgacaatccgtacctgcggtataaccacgccgacgccgagtttcaggagcgtctgcaagaagatacgtcttttgggggcaacctcgggcgagcagtcttccaggccaagaagcgggttctcgaaccttttggtctggttgaggaaggcgctaagacggctcctggaaagaaacgtccggtagagcagtcgccacaagagccagactcctcctcgggcatcggcaagacaggccagcagcccgctaaaaagagactcaattttggtcagactggcgactcagagtcagtccccgacccacaacctctcggagaacctccagcaacccccgctgctgtgggacctactacaatggcttcaggcggtggcgcaccaatggcagacaataacgaaggcgccgacggagtgggtaatgcctcaggaaattggcattgcgattccacatggctgggcgacagagtcatcaccaccagcacccgcacctgggccttgcccacctacaataaccacctctacaagcaaatctccagtgcttcaacgggggccagcaacgacaaccactacttcggctacagcaccccctgggggtattttgatttcaacagattccactgccacttttcaccacgtgactggcagcgactcatcaacaacaattggggattccggcccaagagactcaacttcaagctcttcaacatccaagtcaaggaggtcacgacgaacgatggcgtcacgaccatcgctaataaccttaccagcacggttcaagtcttctcggattcagagtaccaactgccgtacgtcctcggctctgcgcaccagggctgcctccctccgttcccggcggacgtgtttatgattccgcagtacggctacctaacgctcaacaatggcagccaggccgtgggacgttcatccttttactgcccggaatatttcccttctcagatgctgagaacgggcaacaactttaccttcagctacacctttgaggaagtgcctttccacagcagctacgcgcacagccagagcctggaccggctgatgaatcctctcatcgaccaatacctgtattacctgaacagaactcaaaatcagtccggaagtgcccaaaacaaggacttgctgtttagccgtgggtctccagctggcatgtctgttcagcccaaaaactggctacctggaccctgttatcggcagcagcgcgtttctaaaacaaaaacagacaacaacaacagcaattttacctggactggtgcttcaaaatataacctcaatgggcgtgaatccatcatcaaccctggcactgctatggcctcacacaaagacgacaaagacaagttctttcccatgagcggtgtcatgatttttggaaaagagagcgccggagcttcaaatactgcattggacaatgtcatgatcacagatgaagaggaaattaaagccactaaccctgtggccaccgaaagatttgggaccgtggcagtcaatttccagagcagcaacacagaccccgcgaccggagatgtgcatgttatgggagccttacctggcatggtgtggcaagacagagacgtatacctgcagggtcccatttgggccaaaattcctcacacggatggacactttcacccgtctcctctcatgggcggctttggacttaagcacccgcctcctcaaatcctcatcaaaaacacgcctgttcctgcgaatcctccggcagagttttcggctacaaagtttgcttcattcatcacccagtactccacaggacaagtgagtgtggaaattgaatgggagctgcagaaagaaaacagcaagcgctggaatcccgaagtgcagtacacatccaattatgcaaaatctgccaacgttgatttcactgtggacaacaatggactttatactgagcctcgccccattggcacccgttaccttacccgtcccttg

SEQ ID NO: 679 - protein, 736 aa, Artificial Sequence
  Description of Artificial Sequence: Synthetic polypeptide
MAADGYLPDWLEDNLSEGIREWWDLKPGAPKPKANQQKQDDGRGLVLPGYKYLGPFNGLDKGEPVNAADAAALEHDKAYDQQLKAGDNPYLRYNHADAEFQERLQEDTSFGGNLGRAVFQAKKRVLEPFGLVEEGAKTAPGKKRPVEQSPQEPDSSSGIGKTGQQPAKKRLNFGQTGDSESVPDPQPLGEPPATPAAVGPTTMASGGGAPMADNNEGADGVGNASGNWHCDSTWLGDRVITTSTRTWALPTYNNHLYKQISSASTGASNDNHYFGYSTPWGYFDFNRFHCHFSPRDWQRLINNNWGFRPKRLNFKLFNIQVKEVTTNDGVTTIANNLTSTVQVFSDSEYQLPYVLGSAHQGCLPPFPADVFMIPQYGYLTLNNGSQAVGRSSFYCPEYFPSQMLRTGNNFTFSYTFEEVPFHSSYAHSQSLDRLMNPLIDQYLYYLNRTQNQSGSAQNKDLLFSRGSPAGMSVQPKNWLPGPCYRQQRVSKTKTDNNNSNFTWTGASKYNLNGRESIINPGTAMASHKDDKDKFFPMSGVMIFGKESAGASNTALDNVMITDEEEIKATNPVATERFGTVAVNFQSSNTDPATGDVHVMGALPGMVWQDRDVYLQGPIWAKIPHTDGHFHPSPLMGGFGLKHPPPQILIKNTPVPANPPAEFSATKFASFITQYSTGQVSVEIEWELQKENSKRWNPEVQYTSNYAKSANVDFTVDNNGLYTEPRPIGTRYLTRPL

SEQ ID NO: 680 - DNA, 2208 bp, Artificial Sequence
  Description of Artificial Sequence: Synthetic polynucleotide
atggctgccgatggttatcttccagattggctcgaggacaacctctctgagggcattcgcgagtggtgggacttgaaacctggagccccgaaacctaaagccaaccagcaaaagcaggacgacggccggggtctggtgcttcctggctacaagtacctcggacccttcaacggactcgacaagggggagcccgtcaacgcggcggacgcagcggccctcgagcacgacaaggcctacgaccagcagctcaaagcgggtgacaatccgtacctgcggtataaccacgccgacgccgagtttcaggagcgtctacaagaagatacgtcttttgggggcaacctcgggcgagcagtcttccaggccaagaagcgggttctcgaaccttttggtctggttgaggaaggcgctaagacggctcctggaaagaaacgtccggtagagcagtcgccacaagagccagactcctcctcgggcatcggcaagacaggccagcagcccgctaaaaagagactcaattttggtcagactggcgactcagagtcagtccccgacccacaacctctcggagaacctccagcaacccccgctgctgtgggacctactacaatggcttcaggcggtggcgcaccaatggcagacaataacgaaggcgccgacggagtgggtaatgcctcaggaaattggcattgcgattccacatggctgggcgacagagtcatcaccaccagcacccgcacctgggccttgcccacctacaataaccacctctacaagcaaatctccagtgcttcaacgggggccagcaacgacaaccactacttcggctacagcaccccctgggggtattttgatttcaacagattccactgccacttttcaccacgtgactggcagcgactcatcaacaacaattggggattccggcccaagagactcaacttcaagctcttcaacatccaagtcaaggaggtcacgacgaacgatggcgtcacgaccatcgctaataaccttaccagcacggttcaagtcttctcggattcagagtaccaactgccgtacgtcctcggctctgcgcaccagggctgcctccctccgttcccggcggacgtgttcatgattccgcagtacggctacctaacgctcaacaatggcagccaggccgtgggacgttcatccttttactgcctggaatatttcccttctcagatgctgagaacgggcaacaactttaccttcagctacacctttgaggaagtgcctttccacagcagctacgcgcacagccagagcctggaccggctgatgaatcctctcatcgaccaatacctgtattacctgaacagaactcaaaatcagtccggaagtgcccaaaacaaggacttgctgtttagccgtgggtctccagctggcatgtctgttcagcccaaaaactggctacctggaccctgttatcggcagcagcgcgtttctaaaacaaaaacagacaacaacaacagcaattttacctggactggtgcttcaaaatataacctcaatgggcgtgaatccatcatcaaccctggcactgctatggcctcacacaaagacgacaaagacaagttctttcccatgagcggtgtcatgatttttggaaaagagagcgccggagcttcaaatactgcattggacaatgtcatgatcacagatgaagaggaaattaaagccactaaccctgtggccaccgaaagatttgggaccgtggcagtcaatttccagagcagcgacacagaccccgcgaccggagatgtgcatgttatgggagccttacctggcatggtgtggcaagacagagacgtatacctgcagggtcccatttgggccaaaattcctcacacggatggacactttcacccgtctcctctcatgggcggctttggacttaagcacccgcctcctcaaatcctcatcaaaaacacgcctgttcctgcgaatcctccggcagagttttcggctacaaagtttgcttcattcatcacccagtactccacaggacaagtgagtgtggaaattgaatgggagctgcagaaagaaaacagcaagcgctggaatcccgaagtgcagtacacatccaattatgcaaaatctgccaacgttgatttcactgtggacaacaatggactttatactgagcctcgccccattggcacccgttaccttacccgtcccttg

SEQ ID NO: 681 - protein, 736 aa, Artificial Sequence
  Description of Artificial Sequence: Synthetic polypeptide
MAADGYLPDWLEDNLSEGIREWWDLKPGAPKPKANQQKQDDGRGLVLPGYKYLGPFNGLDKGEPVNAADAAALEHDKAYDQQLKAGDNPYLRYNHADAEFQERLQEDTSFGGNLGRAVFQAKKRVLEPFGLVEEGAKTAPGKKRPVEQSPQEPDSSSGIGKTGQQPAKKRLNFGQTGDSESVPDPQPLGEPPATPAAVGPTTMASGGGAPMADNNEGADGVGNASGNWHCDSTWLGDRVITTSTRTWALPTYNNHLYKQISSASTGASNDNHYFGYSTPWGYFDFNRFHCHFSPRDWQRLINNNWGFRPKRLNFKLFNIQVKEVTTNDGVTTIANNLTSTVQVFSDSEYQLPYVLGSAHQGCLPPFPADVFMIPQYGYLTLNNGSQAVGRSSFYCLEYFPSQMLRTGNNFTFSYTFEEVPFHSSYAHSQSLDRLMNPLIDQYLYYLNRTQNQSGSAQNKDLLFSRGSPAGMSVQPKNWLPGPCYRQQRVSKTKTDNNNSNFTWTGASKYNLNGRESIINPGTAMASHKDDKDKFFPMSGVMIFGKESAGASNTALDNVMITDEEEIKATNPVATERFGTVAVNFQSSDTDPATGDVHVMGALPGMVWQDRDVYLQGPIWAKIPHTDGHFHPSPLMGGFGLKHPPPQILIKNTPVPANPPAEFSATKFASFITQYSTGQVSVEIEWELQKENSKRWNPEVQYTSNYAKSANVDFTVDNNGLYTEPRPIGTRYLTRPL

SEQ ID NO: 682 - DNA, 2208 bp, Artificial Sequence
  Description of Artificial Sequence: Synthetic polynucleotide
atggctgccgatggttatcttccagattggctcgaggacaacctctctgagggcattcgcgagtggtgggacttgaaacctggagccccgaaacctaaagccaaccagcaaaagcagggcgacggccggggtctggtgcttcctggctacaagtacctcggacccttcaacggactcgacaagggggagcccgtcaacgcggcggacgcagcggccctcgagcacgacaaggcctacgaccagcagctcaaagcgggtgacaatccgtacctgcggtataaccacgccgacgccgagtttcaggagcgtctgcaagaagatacgtcttttgggggcaacctcgggcgagcagtcttccaggccaagaagcgggttctcgaaccttttggtctggttgaggaaggcgctaagacggctcctggaaagaaacgtccggtagagcagtcgccacaagagccagactcctcctcgggcatcggcaagacaggccagcagcccgctaaaaagagactcaattttggtcagactggcgactcagagtcagtccccgacccacaacctctcggagaacctccagcaacccccgctgctgtgggacctactacaatggcttcaggcggtggcgcaccaatggcagacaataacgaaggcgccgacggagtgggtaatgcctcaggaaattggcattgcgattccacatggctgggcgacagagtcatcaccaccaacactcgcacctgggccttgcccacctacaataaccacctctacaagcaaatctccagtgcttcaacgggggccagcaacgacaaccactacttcggctacagcaccccctgggggtattttgatttcaacagattccactgccacttttcaccacgtgactggcagcgactcatcaacaacaattggggattccggcccaagagactcaacttcaagctcttcaacatccaagtcaaggaggtcacgacgaacgatggcgtcacgaccatcgctaataaccttaccagcacggttcaagtcttctcggattcagagtaccaactgccgtacgtcctcggctctgcgcaccagggctgcctccctccgttcccggcggacgtgttcatgattccgcagtacggctacctaacgctcaacaatggcagccaggccgtgggacgttcatccttttactgcctggaatatttcccttctcagatgctgagaacgggcaacaactttaccttcagctacacctttgaggaagtgcctttccacagcagttacgggcacagccagagcctggaccggctgatgaatcttctcatcgaccaatacctgtattacctgaacagaactcaaaatcagtccggaagtgcccaaaacaaggacttgctgtttagccgtgggtctccagctggcatgtttgttcagcccaaaaactggctacctggaccctgttatcggcagcagcgcgtttctaaaacaaaaacagacaacaacaacagcaattttacctggactggtgcttcaaaatataacctcaatgggcgtgaatccatcatcaaccctggcactgctatggcctcacacaaagacgacgaagacaagttctttcccatgagcggtgtcatgatttttggaaaagagagcgccggagcttcaaatactgcattggacaatgtcatgatcacagatgaagaggaaattaaagccactaaccctgtggccaccgaaagatttgggaccgtggcagtcaatttccagagcagcagcacagaccccgcgaccggagatgtgcatgttatgggagccttacctggcatggtgtggcaagacagagacgtatacctgcagggtcccatttgggccaaaattcctcacacggatggacactttcacccgtctcctctcatgggcggctttggacttaagcacccgcctcctcaaatcctcatcaaaaacacgcctgttcctgcgaatcctccggcagagttttcggctacaaagtttgcttcattcatcacccagtactccacaggacaagtgagtgtggaaattgaatgggagctgcagaaagaaaacagcaagcgctggaatcccgaagtgcagtacacatccaattatgcaaaatctgccaacgttgatttcactgtggacaacaatggactttatactgagcctcgccccattggcacccgttaccttacccgtcccttg

SEQ ID NO: 683 - protein, 736 aa, Artificial Sequence
  Description of Artificial Sequence: Synthetic polypeptide
MAADGYLPDWLEDNLSEGIREWWDLKPGAPKPKANQQKQGDGRGLVLPGYKYLGPFNGLDKGEPVNAADAAALEHDKAYDQQLKAGDNPYLRYNHADAEFQERLQEDTSFGGNLGRAVFQAKKRVLEPFGLVEEGAKTAPGKKRPVEQSPQEPDSSSGIGKTGQQPAKKRLNFGQTGDSESVPDPQPLGEPPATPAAVGPTTMASGGGAPMADNNEGADGVGNASGNWHCDSTWLGDRVITTNTRTWALPTYNNHLYKQISSASTGASNDNHYFGYSTPWGYFDFNRFHCHFSPRDWQRLINNNWGFRPKRLNFKLFNIQVKEVTTNDGVTTIANNLTSTVQVFSDSEYQLPYVLGSAHQGCLPPFPADVFMIPQYGYLTLNNGSQAVGRSSFYCLEYFPSQMLRTGNNFTFSYTFEEVPFHSSYGHSQSLDRLMNLLIDQYLYYLNRTQNQSGSAQNKDLLFSRGSPAGMFVQPKNWLPGPCYRQQRVSKTKTDNNNSNFTWTGASKYNLNGRESIINPGTAMASHKDDEDKFFPMSGVMIFGKESAGASNTALDNVMITDEEEIKATNPVATERFGTVAVNFQSSSTDPATGDVHVMGALPGMVWQDRDVYLQGPIWAKIPHTDGHFHPSPLMGGFGLKHPPPQILIKNTPVPANPPAEFSATKFASFITQYSTGQVSVEIEWELQKENSKRWNPEVQYTSNYAKSANVDFTVDNNGLYTEPRPIGTRYLTRPL

SEQ ID NO: 684 - DNA, 2208 bp, Artificial Sequence
  Description of Artificial Sequence: Synthetic polynucleotide
atggctgccgatggttatcttccagattggctcgaggacaacctctctgagggcattcgcgagtggtgggacttgaaacctggagccccgaaacctaaagccaaccagcaaaagcaggacgacggccggggtctggtgcttcctggctacaagtacctcggacccttcaacggactcgacaagggggagcccgtcaacgcggcggacgcagcggccctcgagcacgacaaggcctacgaccagcagctcaaagcgggtgacaatccgtacctgcggtataaccacgccgacgccgagtttcaggagcgtctgcaagaagatacgtcttttgggggcaacctcgggcgagcagtcttccaggccaagaagcgggttctcgaaccttttggtctggttgaggaaggcgctaagacggctcctggaaagaaacgtccggtagagcagtcgccacaagagccagactcctcctcgggcatcggcaagacaggccagcagcccgctaaaaagagactcaattttggtcagactggcgactcagagtcagtccccgacccacaacctctcggagaacctccagcaacccccgctgctgtgggacctactacaatggcttcaggcggtggcgcaccaatggcagacaataacgaaggcgccgacggagtgggtaatgcctcaggaaattggcattgcgattccacatggctgggcgacagagtcatcaccaccaacacccgcacctgggccttgcccacctacaataaccacctctacaagcaaatctccagtgcttcaacgggggccagcaacgacaaccactacttcggctacagcaccccctgggggtattttgatttcaacagattccactgccacttttcaccacgtgactggcagcgactcatcaacaacaattggggattccggcccaagagactcaacttcaagctcttcaacatccaagtcaaggaggtcacgacgaacgatggcgtcacgaccatcgctaataaccttaccagcacggttcaagtcttctcggattcagagtaccaactgccgtacgtcctcggctctgcgcaccagggctgcctccctccgttcccggcggacgtgttcatgattccgcagtacggctacctaatgctcaacaatggcagccaggccgtgggacgttcatccttttactgcctggaatatttcccttctcagatgctgagaacgggcaacaactttaccttcagctacacctttgaggaagtgcctttccacagcagctacgcgcacagccagagcctggaccggctgatgaatcctctcatcgaccaatacctgtattacctgaacagaactcaaaatcagtccggaagtgcccaaaacaaggacttgctgtttagccgtgggtctccagctggcatgtctgttcagcccaaaaactggctacctggaccctgttatcggcagcagcgcgtttctaaaacaaaaacagacaacaacaacagcaattttacctggactggtgcttcaaaatataacctcaatgggcgtgaatccatcatcaaccctggcactgctatggcctcacacaaagacgacgaagacaagttctttcccatgagcggtgtcatgatttttggaaaagagagcgccggagcttcaaatactgcattggacaatgtcatgatcacagatgaagaggaaattaaagccactaaccctgcggccaccgaaagatttgggaccgtggcagtcaatttccagagcagcagcacagaccccgcgaccggagatgtgcatgttatgggagccttacctggcatggtgtggcaagacagagacgtatacctgcagggtcccatttgggccaaaattcctcacacggatggacactttcacccgtctcctctcatgggcggctttggacttaagcacccgcctcctcaaatcctcatcaaaaacacgcctgttcctgcgaatcctccggcagagttttcggctacaaagtttgcttcattcatcacccagtactccacaggacaagtgagtgtggaaattgaatgggagctgcagaaagaaaacagcaagcgctggaatcccgaagtgcagtacacatccaattatgcaaaatctgccaacgttgatttcactgtggacaacaatggactttatactgagcctcgccccattggcacccgttaccttacccgtcccttg

SEQ ID NO: 685 - protein, 736 aa, Artificial Sequence
  Description of Artificial Sequence: Synthetic polypeptide
MAADGYLPDWLEDNLSEGIREWWDLKPGAPKPKANQQKQDDGRGLVLPGYKYLGPFNGLDKGEPVNAADAAALEHDKAYDQQLKAGDNPYLRYNHADAEFQERLQEDTSFGGNLGRAVFQAKKRVLEPFGLVEEGAKTAPGKKRPVEQSPQEPDSSSGIGKTGQQPAKKRLNFGQTGDSESVPDPQPLGEPPATPAAVGPTTMASGGGAPMADNNEGADGVGNASGNWHCDSTWLGDRVITTNTRTWALPTYNNHLYKQISSASTGASNDNHYFGYSTPWGYFDFNRFHCHFSPRDWQRLINNNWGFRPKRLNFKLFNIQVKEVTTNDGVTTIANNLTSTVQVFSDSEYQLPYVLGSAHQGCLPPFPADVFMIPQYGYLMLNNGSQAVGRSSFYCLEYFPSQMLRTGNNFTFSYTFEEVPFHSSYAHSQSLDRLMNPLIDQYLYYLNRTQNQSGSAQNKDLLFSRGSPAGMSVQPKNWLPGPCYRQQRVSKTKTDNNNSNFTWTGASKYNLNGRESIINPGTAMASHKDDEDKFFPMSGVMIFGKESAGASNTALDNVMITDEEEIKATNPAATERFGTVAVNFQSSSTDPATGDVHVMGALPGMVWQDRDVYLQGPIWAKIPHTDGHFHPSPLMGGFGLKHPPPQILIKNTPVPANPPAEFSATKFASFITQYSTGQVSVEIEWELQKENSKRWNPEVQYTSNYAKSANVDFTVDNNGLYTEPRPIGTRYLTRPL

SEQ ID NO: 686 - DNA, 2208 bp, Artificial Sequence
  Description of Artificial Sequence: Synthetic polynucleotide
atggctgccgatggttatcttccagattggctcgaggacaacctctctgagggcattcgcgagtggtgggacttgaaacctggagccccgaaacctaaagccaaccagcaaaagcaggacgacggccggggtctggtgcttcctggctacaagtacctcggacccttcaacggactcgacaagggggagcccgtcaacgcggcggacgcagcggccctcgagcacgacaaggcctacgaccagcagctcaaagcgggtgacaatccgtacctgcggtataaccacgccgacgccgagtttcaggagcgtctgcaagaagatacgtcttttgggggcaacctcgggcgagcagtcttccaggccaagaagcgggttctcgaaccttttggtctggttgaggaaggcgctaagacggctcctggaaagaaacgtccggtagagcagtcgccacaagagccagactcctcctcgggcatcggcaagacgggccagcagcccgctaaaaagagactcaattttggtcagactggcgactcagagtcagtccccgacccacaacctctcggagaacctccagcaacccccgctgctgtgggacctactacaatggcttcaggcggtggcgcaccaatggcagacaataacgaaggcgccgacggagtgggtaatgcctcaggaaattggcattgcgattccacatggctgggcgacagagtcatcaccaccagcacccgcacctgggccttgcccacctacaataaccacctctacaagcaaatctccagtgcttcaacgggggccagcaacgacaaccactacttcggctacagcaccccctgggggtattttgatttcaacagattccactgccacttttcaccacgtgactggcagcgactcatcaacaacaattggggattccggcccaagagactcaacttcaagctcttcaacatccaagtcaaggaggtcacgacgaacgatggcgtcacgaccatcgctaataaccttaccagcacggttcaagtcttctcggattcagagtaccaactgccgtacgtcctcggctctgcgcaccagggctgcctccctccgttcccggcggacgtgttcatgattccgcagtacggctacctaacgctcaacaatggcagccaggccgtgggacgttcatccttttactgcctggaatatttcccttctcagatgctgagaacgggcaacaactttaccttcagctacacctttgaggaagtgcctttccacagcagctacgcgcacagccagagcctggaccggctgatgaatcctctcatcgaccaatacctgtattacctgaacagaactcaaaatcagtccggaagtgcccaaaacaaggacttgctgtttagccgtgggtctccagctggcatgtccgttcagcccaaaaactggctacctggaccctgttatcggcagcagcgcgtttctaaaacaaaaacagacaacaacaacagcaattttacctggactggtgcttcaaaatataacctcaatgggcgtgaatccatcatcaaccctggcactgctatggcctcacacaaagacgacgaagacaagttctttcccatgagcggtgtcatgatttttggaaaagagagcgccggagcttcaaatactgcattggacaatgtcatgatcacagatgaagaggaaattaaagccactaaccctgtggccaccgaaagatttgggaccgtggcagtcaatttccagagcagcagcacagaccccgcgaccggagatgtgcatgttatgggagccttacctggcatggtgtggcaagacagagacgtatacctgcagggtcccatttgggccaaaattcctcacacggatggacactttcacccgtctcctctcatgggcggctttggacttaagcacccgcctcctcaaatcctcatcaaaaacacgcctgttcctgcgaatcctccggcagagttttcggctacaaagtttgcttcattcatcacccagtactccacaggacaagtgagtgtggaaattgaatgggagctgcagaaagaaaacagcaagcgctggaatcccgaagtgcagtacacatccaattatgcaaaatctgccaacgttgatttcactgtggacaacaatggactttatactgagcctcgccccattggcacccgttaccttacccgtcccttg

SEQ ID NO: 687 - protein, 736 aa, Artificial Sequence
  Description of Artificial Sequence: Synthetic polypeptide
MAADGYLPDWLEDNLSEGIREWWDLKPGAPKPKANQQKQDDGRGLVLPGYKYLGPFNGLDKGEPVNAADAAALEHDKAYDQQLKAGDNPYLRYNHADAEFQERLQEDTSFGGNLGRAVFQAKKRVLEPFGLVEEGAKTAPGKKRPVEQSPQEPDSSSGIGKTGQQPAKKRLNFGQTGDSESVPDPQPLGEPPATPAAVGPTTMASGGGAPMADNNEGADGVGNASGNWHCDSTWLGDRVITTSTRTWALPTYNNHLYKQISSASTGASNDNHYFGYSTPWGYFDFNRFHCHFSPRDWQRLINNNWGFRPKRLNFKLFNIQVKEVTTNDGVTTIANNLTSTVQVFSDSEYQLPYVLGSAHQGCLPPFPADVFMIPQYGYLTLNNGSQAVGRSSFYCLEYFPSQMLRTGNNFTFSYTFEEVPFHSSYAHSQSLDRLMNPLIDQYLYYLNRTQNQSGSAQNKDLLFSRGSPAGMSVQPKNWLPGPCYRQQRVSKTKTDNNNSNFTWTGASKYNLNGRESIINPGTAMASHKDDEDKFFPMSGVMIFGKESAGASNTALDNVMITDEEEIKATNPVATERFGTVAVNFQSSSTDPATGDVHVMGALPGMVWQDRDVYLQGPIWAKIPHTDGHFHPSPLMGGFGLKHPPPQILIKNTPVPANPPAEFSATKFASFITQYSTGQVSVEIEWELQKENSKRWNPEVQYTSNYAKSANVDFTVDNNGLYTEPRPIGTRYLTRPL

SEQ ID NO: 688 - DNA, 2208 bp, Artificial Sequence
  Description of Artificial Sequence: Synthetic polynucleotide
  misc_feature (305)..(305): n is a, c, g, or t
atggctgccgatggttatcttccagattggctcgaggacaacctctctgagggcattcgcgagtggtgggacttgaaacctggagccccgaaacctaaagccaaccagcaaaagcaggacgacggccggggtctggtgcttcctggctacaagtacctcggacccttcaacggactcgacaagggggagcccgtcaacgcggcggacgcagcggccctcgagcacgacaaggcctacgaccagcagctcaaagcgggtgacaatccgtacctgcggtataaccacgccgacgccgagtttcaggngcgtctgcaagaagatacgtcttttgggggcaacctcgggcgagcagtcttccaggccaagaagcgggttctcgaaccttttggtctggttgaggaaggcgctaagacggctcctggaaagaaacgtccggtagagcagtcgccacaagagccagactcctcctcgggcatcggcaagacaggccagcagcccgctaaaaagagactcaattttggtcagactggcgactcagagtcagtccccgacccacaacctctcggagaacctccagcaacccccgctgctgtgggacctactacaatggcttcaggcggtggcgcaccaatggcagacaataacgaaggcgccgacggagtgggtaatgcctcaggaaattggcattgcgattccacatggctgggcggcagagtcatcaccaccagcacccgcacctgggccttgcccacctacaataaccacctctacaagcaaatctccagtgcttcaacgggggccagcaacgacaaccactacttcggccacagcaccccctgggggtattttgatttcaacagattccactgccacttttcaccacgtgactggcagcgactcatcaacaacaattggggattccggcccaagagactcaacttcaagctcttcaacatccaagtcaaggaggtcacgacgaacgatggcgtcacgaccatcgctaataaccttaccagcacggttcaagtcttctcggattcagagtaccaactgccgtacgtcctcggctctgcgcaccagggctgcctccctccgtccccggcggacgtgttcatgattccgcagtacggctacctaacactcaacaatggcagccaggccgtgggacgttcatccttttactgcctggaatatttcccttctcagatgctgagaacgggcaacaactttaccttcagctacacctttgaggaagtgcctttccacagcagctacgcgcacagccagagcctggaccggctgatgaatcctctcatcgaccaatacctgtattacctgaacagaactcaaaatcagtccggaagtgcccaaaacaaggacttgctgtttagccgtgggtctccagctggcatgtctgttcagcccaaaaactggctacctggaccctgttatcggcagcagcgcgtttctaaaacaaaaacagacaacaacaacagcaattttacctggactggtgcttcaaaatataacctcaatgggcgtgaatccatcatcaaccctggcactgctatggcctcacacaaagacgacaaagacaagttctttcccatgagcggtgtcatgatttttggaaaagagagcgccggagcttcaaatactgcattggacaatgtcatgatcacagatgaagaggaaattaaagccactaaccctgtggccaccgaaagatttgggaccgtggcagtcaatttccagagcagcaacacagaccccgcgaccggagatgtgcatgttatgggagccttacctggcatggtgtggcaagacagagacgtatacctgcagggtcccatttgggccaaaattcctcacacggatggacactttcacccgtctcctctcatgggcggctttggacttaagcacccgcctcctcaaatcctcatcaaaaacacgcctgttcctgcgaatcctccggcagagttttcggctacaaagtttgcttcattcatcacccagtactccacaggacaagtgagtgtggaaattgaatgggagctgcagaaagaaaacagcaagcgctggaatcccgaagtgcagtacacatccaattatgcaaaatctgccaacgttgatttcactgtggacaacaatggactttatactgagcctcgccccattggcacccgttaccttacccgtcccttg

SEQ ID NO: 689 - protein, 736 aa, Artificial Sequence
  Description of Artificial Sequence: Synthetic polypeptide
  misc_feature (102)..(102): Xaa can be any naturally occurring amino acid
MAADGYLPDWLEDNLSEGIREWWDLKPGAPKPKANQQKQDDGRGLVLPGYKYLGPFNGLDKGEPVNAADAAALEHDKAYDQQLKAGDNPYLRYNHADAEFQXRLQEDTSFGGNLGRAVFQAKKRVLEPFGLVEEGAKTAPGKKRPVEQSPQEPDSSSGIGKTGQQPAKKRLNFGQTGDSESVPDPQPLGEPPATPAAVGPTTMASGGGAPMADNNEGADGVGNASGNWHCDSTWLGGRVITTSTRTWALPTYNNHLYKQISSASTGASNDNHYFGHSTPWGYFDFNRFHCHFSPRDWQRLINNNWGFRPKRLNFKLFNIQVKEVTTNDGVTTIANNLTSTVQVFSDSEYQLPYVLGSAHQGCLPPSPADVFMIPQYGYLTLNNGSQAVGRSSFYCLEYFPSQMLRTGNNFTFSYTFEEVPFHSSYAHSQSLDRLMNPLIDQYLYYLNRTQNQSGSAQNKDLLFSRGSPAGMSVQPKNWLPGPCYRQQRVSKTKTDNNNSNFTWTGASKYNLNGRESIINPGTAMASHKDDKDKFFPMSGVMIFGKESAGASNTALDNVMITDEEEIKATNPVATERFGTVAVNFQSSNTDPATGDVHVMGALPGMVWQDRDVYLQGPIWAKIPHTDGHFHPSPLMGGFGLKHPPPQILIKNTPVPANPPAEFSATKFASFITQYSTGQVSVEIEWELQKENSKRWNPEVQYTSNYAKSANVDFTVDNNGLYTEPRPIGTRYLTRPL

SEQ ID NO: 690 - DNA, 2208 bp, Artificial Sequence
  Description of Artificial Sequence: Synthetic polynucleotide
atggctgccgatggttattttccagattggctcgaggacaacctttctgagggcattcgcgagtggtgggacttgaaacctggagccccgaaacctaaagccaaccagcaaaagcaggacgacggccggggtctggtgcttcctggctacaagtacctcggacccttcaacggactcgacaagggggagcccgtcaacgcggcggacgcagcggccctcgagcacgacaaggcctacgaccagcagctcaaagcgggtgacaatccgtacctgcggtataaccacgccgacgccgagtttcaggagcgtctgcaagaagatacgtcttttgggggcaacctcgggcgagcagtcttccaggccaagaagcgggttctcgaaccttttggtctggttgaggaaggcgctaagacggctcctggaaagaaacgtccggtagagcagtcgccacaagagccagactcctcctcgggcatcggcaggacaggccagcagcccgctaaaaagagactcaattttggtcagactggcgactcagagtcagtccccgacccacaacctctcggagaacctccagcgacccccgctgctgtgggacctactacaatggcttcaggcggtggcgcaccaatggcagacaataacgaaggtgccgacggagtgggtaatgcctcaggaaattggcattgcgattccacatggctgggcgacagagtcatcaccaccagcacccgcacctgggccttgcccacctacaataaccacctctacaagcaaatctccagtgcttcaacgggggccagcaacgacaaccactacttcggctacagcaccccctgggggtattttgatttcaacagattccactgccacttttcaccacgtgactggcagcgactcatcaacaacaattggggattccggcccaagagactcaacttcaagctcttcaacatccaagtcaaggaggtcacgacgaacgatggcgtcacgaccatcgctaataaccttaccagcacggttcaagtcttctcggattcagagtaccaactgccgtacgtcctcggctctgcgcaccagggctgcctccctccgttcccggcggacgtgttcatgattccgcagtacggctacctaacgctcaacaatggcagccaggccgtgggacgttcatccttttactgcctggaatatttcccttctcagatgctgagaacgggcaacaactttaccttcagctacacctttgaggaagtgcctttccacagcagctacgcgcacagccagagcctggaccggctgatgaatcctctcatcgaccaatacctgtattacctgaacagaactcaaaatcagtccggaagtgcccaaaacaaggacttgctgtttagccgtgggtctccagctggcatgtctgttcagcccaaaaactggctacctggaccctgttatcggcagcagcgcgtttctaaaacaaaaacagacaacaacaacagcaattttacctggactggtgcttcaaaatataacctcaatgggcgtgaatccatcatcaaccctggcactgctatggcctcacacaaagacgacgaagacaagttctttcccatgagcggtgtcatgatttttggaaaagagagcgccggagcttcaaatactgcattggacaatgtcatgatcacagatgaagaggaaattaaagccactaaccctgtggccaccgaaagatttgggaccgtggcagtcaatttccagagcagcagcccagaccccgcgaccggagatgtgcatgttatgggagccttacctggcatggtgtggcaagacagagacgtatacctgcagggtcccatttgggccaaaattcctcacacggatggacactttcacccgtctcctctcatgggcggctttggacttaagcacccgcctcctcaaatcctcatcaaaaacacgcctgttcctgcgaatcctccggcagagttttcggctacaaagtttgcttcattcatcacccagtactccacaggacaagtgagtgtggaaattgaatgggagctgcagaaagaaaacagcaagcgctggaatcccgaagtgcagtacacatccaattatgcaaaatctgccaacgttgatttcactgtggacaacaatggactttatagtgagcctcgccccattggcacccgttaccttacccgtcccttg

SEQ ID NO: 691 - protein, 736 aa, Artificial Sequence
  Description of Artificial Sequence: Synthetic polypeptide
MAADGYFPDWLEDNLSEGIREWWDLKPGAPKPKANQQKQDDGRGLVLPGYKYLGPFNGLDKGEPVNAADAAALEHDKAYDQQLKAGDNPYLRYNHADAEFQERLQEDTSFGGNLGRAVFQAKKRVLEPFGLVEEGAKTAPGKKRPVEQSPQEPDSSSGIGRTGQQPAKKRLNFGQTGDSESVPDPQPLGEPPATPAAVGPTTMASGGGAPMADNNEGADGVGNASGNWHCDSTWLGDRVITTSTRTWALPTYNNHLYKQISSASTGASNDNHYFGYSTPWGYFDFNRFHCHFSPRDWQRLINNNWGFRPKRLNFKLFNIQVKEVTTNDGVTTIANNLTSTVQVFSDSEYQLPYVLGSAHQGCLPPFPADVFMIPQYGYLTLNNGSQAVGRSSFYCLEYFPSQMLRTGNNFTFSYTFEEVPFHSSYAHSQSLDRLMNPLIDQYLYYLNRTQNQSGSAQNKDLLFSRGSPAGMSVQPKNWLPGPCYRQQRVSKTKTDNNNSNFTWTGASKYNLNGRESIINPGTAMASHKDDEDKFFPMSGVMIFGKESAGASNTALDNVMITDEEEIKATNPVATERFGTVAVNFQSSSPDPATGDVHVMGALPGMVWQDRDVYLQGPIWAKIPHTDGHFHPSPLMGGFGLKHPPPQILIKNTPVPANPPAEFSATKFASFITQYSTGQVSVEIEWELQKENSKRWNPEVQYTSNYAKSANVDFTVDNNGLYSEPRPIGTRYLTRPL

SEQ ID NO: 692 - DNA, 2208 bp, Artificial Sequence
  Description of Artificial Sequence: Synthetic polynucleotide
atggctgccgatggttatcttccagattggctcgaggacaacctctctgagggcattcgcgagtggtgggacttgaaacctggagccccgaaacctaaagccaaccagcaaaagcaggacgacggccggggtctggtgcttcctggctacaagtacctcggacccttcaacggactcgacaagggggagcccgtcaacgcggcggacgcagcggccctcgagcacgacaaggcctacgaccagcagctcaaagcgggtgacaatccgtacctgcggtataaccacgccgacgccgagtttcaggagcgtctgcaagaagatacgtcttttgggggcaacctcgggcgagcagtcttccaggccaagaagcgggttctcgaaccttttggtctggttgaggaaggcgctaagacggctcctggaaagaaacgtccggtagagcagtcgccacaagagccagactcctcctcgggcatcggcaagacaggccagcagcccgctaaaaagagactcaattttggtcagactggcgactcagagtcagtccccgacccacaacctctcggagaacctccagcaacccccgctgctgtgggacctactacaatggcttcaggcggtggcgcaccaatggcagacaataacgaaggcgccgacggagtgggtaatgcctcaggaaattggcattgcgattccacatggctgggcgacagagtcatcaccaccagcacccgcacctgggccttgcccacctacaataaccacctctacaagcaaacctccagtgcttcaacgggggccagcaacgacaaccactacttcggctacagcaccccctgggggtattttgatttcaacagattccactgccacttttcaccacgtgactggcagcgactcatcaacaacaattggggattccggcccaagagactcaacttcaagctcttcaacatccaagtcaaggaggtcacgacgaacgatggcgtcacgaccatcgctaataaccttaccagcacggttcaagtcttctcggattcagagtaccaactgccgtacgtcctcggctctgcgcaccagggctgcctccctccgttcccggcggacgtgttcatgattccgcagtacggctacctaacgctcaacaatggcagccaggccgtgggacgttcatccttttactgcctggaatatttcccttctcagatgctgagaacgggcaacaactttaccttcagctacacctttgaggaagtgcctttccacagcagctacgcgcacagccagagcctggaccggctgatgaatcctctcatcgaccaatacctgtattacctgaacagaactcaaaatcagtccggaagtgcccaaaacaaggacttgctgtttagccgtgggtctccagctggcatgtctgttcagcccaaaaactggctacctggaccctgttatcggcagcagcgcgtttctaaaacaaaaacagactacaacaacagcaattttacctggactggtgcttcaaaatataacctcaatgggcgtgaatccatcatcaaccctggcactgctatggcctcacacaaagacgacgaagacaagttctttcccatgagcggtgtcatgatttttggaaaagagagcgccggagcttcaaatactgcattggacaatgtcatgatcacagatgaagaggaaattaaagccactaaccctgtggccaccgaaagatttgggaccgtggcagtcaatttccagagcagcagcacagaccccgcgaccggagatgtgcatgttatgggagccttacctggcatggtgtggcaagacagagacgtatacctgcagggtcccatttgggccaaaattcctcacacggatggacactttcacccgtctcctctcatgggcggctttggacttaagcacccgcctcctcaaatcctcatcaaaaacacgcctgttcctgcgaatcctccggcagagttttcggctacaaagtttgcttcattcatcacccagtactccacaggacaagtgagtgtggaaattgaatgggagctgcagaaagaaaacagcaagcgctggaatcccgaagtgcagtacacatccaattatgcaaaatctgccaacgttgatttcactgtggacaacaatggactttatactgagcctcgccccattggcacccgttaccttacccgtcccttg

SEQ ID NO: 693 - protein, 736 aa, Artificial Sequence
  Description of Artificial Sequence: Synthetic polypeptide
MAADGYLPDWLEDNLSEGIREWWDLKPGAPKPKANQQKQDDGRGLVLPGYKYLGPFNGLDKGEPVNAADAAALEHDKAYDQQLKAGDNPYLRYNHADAEFQERLQEDTSFGGNLGRAVFQAKKRVLEPFGLVEEGAKTAPGKKRPVEQSPQEPDSSSGIGKTGQQPAKKRLNFGQTGDSESVPDPQPLGEPPATPAAVGPTTMASGGGAPMADNNEGADGVGNASGNWHCDSTWLGDRVITTSTRTWALPTYNNHLYKQTSSASTGASNDNHYFGYSTPWGYFDFNRFHCHFSPRDWQRLINNNWGFRPKRLNFKLFNIQVKEVTTNDGVTTIANNLTSTVQVFSDSEYQLPYVLGSAHQGCLPPFPADVFMIPQYGYLTLNNGSQAVGRSSFYCLEYFPSQMLRTGNNFTFSYTFEEVPFHSSYAHSQSLDRLMNPLIDQYLYYLNRTQNQSGSAQNKDLLFSRGSPAGMSVQPKNWLPGPCYRQQRVSKTKTDYNNSNFTWTGASKYNLNGRESIINPGTAMASHKDDEDKFFPMSGVMIFGKESAGASNTALDNVMITDEEEIKATNPVATERFGTVAVNFQSSSTDPATGDVHVMGALPGMVWQDRDVYLQGPIWAKIPHTDGHFHPSPLMGGFGLKHPPPQILIKNTPVPANPPAEFSATKFASFITQYSTGQVSVEIEWELQKENSKRWNPEVQYTSNYAKSANVDFTVDNNGLYTEPRPIGTRYLTRPL

SEQ ID NO: 694 - DNA, 2208 bp, Artificial Sequence
  Description of Artificial Sequence: Synthetic polynucleotide
atggctgccgatggttatcctccagattggctcgaggacaacctctctgagggcattcgcgagtggtgggacttgaaacctggagtcccgaaacctaaagccaaccagcaaaagcaggacgacggccggggtctggtgcttcctggctacaagtacctcggacccttcaacggactcgacaagggggagcccgtcaacgcggcggacgcagcggccctcgagcacgacaaggcctacgaccagcagctcaaagcgggtgacaatccgtacctgcggtataaccacgccgacgccgagtttcaggagcgtctgcaagaagatacgtcttttgggggcaacctcgggcgagcagtcttccaggccaagaagcgggttctcgaaccttttggtctggttgaggaaggcgctaagacggctcctggaaagaaacgtccggtagagcagtcgccacaagagccagactcctcctcgggcatcggcaagacaggccagcagcccgctaaaaagagactcaattttggtcagactggcgactcagagtcagtccccgacccacaacctctcggagaacctccagcaacccccgctgctgtgggacctactacaatggcttcaggcggtggcgcaccaatggcagacaataacgaaggcgccgacggagtgggtaatgcctcaggaaattggcattgcgattccacatggctgggcgacagagtcatcaccaccagcacccgcacctgggccttgcccacctacaataaccacctctacaagcaaatctccagtgcttcaacgggggccagcaacgacaaccactacttcggctacagcaccccctgggggtattttgatttcaacagattccactgccacttttcaccacgtgactggcagcgactcatcaacaacaattggggattccggcccaagagactcaacttcaagctcttcaacatccaagtcaaggaggtcacgacgaacgatggcgtcacgaccatcgctaataaccttaccagcacggttcaagtcttctcggattcagagtaccaactgccgtacgtcctcggctctgcgcaccagggctgcctccctccgttcccggcggacgtgttcatgattccgcagtacggctacctaacgctcaacaatggcagccaggccgtgggacgttcatccttttactgcctggaatatttcccttctcagatgctgagaacgggcaacaactttaccttcagctacacctttgaggaagtgcctttccacagcagctacgcgcacagccagagcctggaccggctgatgaatcctctcatcgaccaatacctgtattacctgaacagaactcaaaatcagtccggaagtgcccaaaacaaggacttgctgtttagccgtgggtctccagctggcatgtctgttcagcccaaaaactggctacctggaccctgttatcggcagcagcgcgtttctaaaacaaaaacagacaacaacaacagcaattttacctggactggtgcttcaaaatataacctcaatgggcgtgaatccatcatcaaccctggcactgctatggcctcacacaaagacgacgaagacaagttctttcccatgagcggtgtcatgatttttggaaaagagagcgccggagcttcaaatactgcattggacaatgtcatgatcacagatgaagaggaaattaaagccactaaccctgtggccaccgaaagatttgggaccgtggcagtcaatttccagagcagcagcacagaccccgcgaccggagatgtgcatgttatgggagccttacctggcatggtgtggcaagacagagacgtatacctgcagggtcccatttgggccaaaattcctcacacggatggacactttcacccgtctcctctcatgggcggctttggacttaagcacccgcctcctcaaatcctcatcaaaaacacgcctgttcctgcgaatcctccggcagagttttcggctacaaagtttgcttcattcatcacccagtactccacaggacaagtgagtgtggaaattgaatgggagctgcagaaagaaaacagcaagcgctggaatcccgaagtgcagtacacatccaattatgcaaaatctgccaacgttgatttcactgtggacaacaatggactttatactgagcctcgccccattggcacccgttaccttacccgtcccttg

SEQ ID NO: 695 - protein, 736 aa, Artificial Sequence
  Description of Artificial Sequence: Synthetic polypeptide
MAADGYPPDWLEDNLSEGIREWWDLKPGVPKPKANQQKQDDGRGLVLPGYKYLGPFNGLDKGEPVNAADAAALEHDKAYDQQLKAGDNPYLRYNHADAEFQERLQEDTSFGGNLGRAVFQAKKRVLEPFGLVEEGAKTAPGKKRPVEQSPQEPDSSSGIGKTGQQPAKKRLNFGQTGDSESVPDPQPLGEPPATPAAVGPTTMASGGGAPMADNNEGADGVGNASGNWHCDSTWLGDRVITTSTRTWALPTYNNHLYKQISSASTGASNDNHYFGYSTPWGYFDFNRFHCHFSPRDWQRLINNNWGFRPKRLNFKLFNIQVKEVTTNDGVTTIANNLTSTVQVFSDSEYQLPYVLGSAHQGCLPPFPADVFMIPQYGYLTLNNGSQAVGRSSFYCLEYFPSQMLRTGNNFTFSYTFEEVPFHSSYAHSQSLDRLMNPLIDQYLYYLNRTQNQSGSAQNKDLLFSRGSPAGMSVQPKNWLPGPCYRQQRVSKTKTDNNNSNFTWTGASKYNLNGRESIINPGTAMASHKDDEDKFFPMSGVMIFGKESAGASNTALDNVMITDEEEIKATNPVATERFGTVAVNFQSSSTDPATGDVHVMGALPGMVWQDRDVYLQGPIWAKIPHTDGHFHPSPLMGGFGLKHPPPQILIKNTPVPANPPAEFSATKFASFITQYSTGQVSVEIEWELQKENSKRWNPEVQYTSNYAKSANVDFTVDNNGLYTEPRPIGTRYLTRPL

SEQ ID NO: 696 - DNA, 2196 bp, Artificial Sequence
  Description of Artificial Sequence: Synthetic polynucleotide
atggctgccgatggttatcttccagattggctcgaggacaacctctctgagggcattcgcgagtggtgggacttgaaacctggagccccgaaacctaaagccaaccagcaaaagcaggacgacggccggggtctggtgcttcctggctacaagtacctcggacccttcaacggactcgacaagggggagcccgtcaacgcggcggacgcagcggccctcgagcacgacaaggcctacgaccagcagctcaaagcgggtgacaatccgtacctgcggtataaccacgccgacgccgagtttcaggagcgtctgcaagaagatacgtcttttgggggcaacctcgggcgagcagtcttccaggccaagaagcgggttctcgaaccttttggtctggttgaggaaggcgctaagacggctcctggaaagaaacgtccggtagagcagtcgccacaagagccagactcctcctcgggcatcggcaagacaggccagcagcccgctaaaaagagactcaattttggtcagactggcgactcagagtcagtccccgacccacaacctctcggagaacctccagcaacccccgctgctgtgggacctactacaatggcttcaggcggtggcgcaccaatggcagacaataacgaaggcgccgacggagtgggtaatgcctcaggaaattggcattgcgattccacatggctgggcgacagagtcatcaccaccagcacccgcacctgggccttgcccacctacaataaccacctctacaagcaaatctccagtgcttcaacgggggccagcaacgacaaccactacttcggctacagcaccccctgggggtattttgatttcaacagattccactgccacttttcaccacgtgactggcagcgactcatcaacaacaattggggattccggcccaagagactcaacttcaagctcttcaacatccaagtcaaggaggtcacgacgaacgatggcgtcacgaccatcgctaataaccttaccagcacggttcaagccttctcggattcagagtaccaactgccgtacgtcctcggctctgcgcaccagggctgcctccctccgttcccggcggacgtgttcatgattccgcagtacggctacctaacgctcaacaatggcagccaggccgtgggacgttcatccttttactgcctggaatatttcccttctcagatgctgagaacgggcaacaactttaccttcagctacacctttgaggaagtgcctttccacagcagctacgcgcacagccagagcctggaccggctgatgaatcctctcatcgacccatacctgtattacctgaacagaactcaaaatcagtccggaagtgcccaaaacaaggacttgctgtttagccgtgggtctccagctggcatgtctgttcagcccaaaaactggctacctggaccctgttatcggcagcagcgcgtttctaaaacaaaaacagacaacaacaacagcaattttacctggactggtgcttcaaaatataacctcaatgggcgtgaatccatcatcaaccctggcactgctatggcctcacacaaagacgacgaagacaagttctttcccatgagcggtgtcatgatttttggaaaagagagcgccggagcttcaaatactgcattggacaatgtcatgatcacagatgaagaggaaattaaagccactaaccctgtggccaccgaaagatttgggaccgtggcagtcaatttccagagcagcagcacagaccccgcgaccggagatgtgcatgttatgggagccttacctggcatggtgtggcaagacagagacgtatacctgcagggtcccatttgggccaaaattcctcacacggatggacactttcacccgtctcctctcatgggcggctttggacttaagcacccgcctcctcaaatcctcatcaaaaacacgcctgttcctgcgaatcctccggcagagttttcggctacaaagtttgcttcattcatcacccagtactccacaggacaagtgagtgtggaaattgaatgggagctgcagaaagaaaacagcaagcgctggaatcccgaagtgcagtacacatccaattatgcaaaatctgccaacgttgatttcactgtggacaacaatggactttatactgagcctcgccccattggcacccgttacctt

SEQ ID NO: 697 - protein, 732 aa, Artificial Sequence
  Description of Artificial Sequence: Synthetic polypeptide
MAADGYLPDWLEDNLSEGIREWWDLKPGAPKPKANQQKQDDGRGLVLPGYKYLGPFNGLDKGEPVNAADAAALEHDKAYDQQLKAGDNPYLRYNHADAEFQERLQEDTSFGGNLGRAVFQAKKRVLEPFGLVEEGAKTAPGKKRPVEQSPQEPDSSSGIGKTGQQPAKKRLNFGQTGDSESVPDPQPLGEPPATPAAVGPTTMASGGGAPMADNNEGADGVGNASGNWHCDSTWLGDRVITTSTRTWALPTYNNHLYKQISSASTGASNDNHYFGYSTPWGYFDFNRFHCHFSPRDWQRLINNNWGFRPKRLNFKLFNIQVKEVTTNDGVTTIANNLTSTVQAFSDSEYQLPYVLGSAHQGCLPPFPADVFMIPQYGYLTLNNGSQAVGRSSFYCLEYFPSQMLRTGNNFTFSYTFEEVPFHSSYAHSQSLDRLMNPLIDPYLYYLNRTQNQSGSAQNKDLLFSRGSPAGMSVQPKNWLPGPCYRQQRVSKTKTDNNNSNFTWTGASKYNLNGRESIINPGTAMASHKDDEDKFFPMSGVMIFGKESAGASNTALDNVMITDEEEIKATNPVATERFGTVAVNFQSSSTDPATGDVHVMGALPGMVWQDRDVYLQGPIWAKIPHTDGHFHPSPLMGGFGLKHPPPQILIKNTPVPANPPAEFSATKFASFITQYSTGQVSVEIEWELQKENSKRWNPEVQYTSNYAKSANVDFTVDNNGLYTEPRPIGTRYL

SEQ ID NO: 698 - DNA, 2208 bp, Artificial Sequence
  Description of Artificial Sequence: Synthetic polynucleotide
atggctgccgatggttatcttccagattggctcgaggacaacctctctgagggcattcgcgagtggtgggacttgaaacctggagccccgaaacctaaagccaaccagcaaaagcaggacgacggccggggtctggtgcttcctggctacaagtacctcggacccttcaacggactcgacaagggggagcccgtcaacgcggcggacgcagcggccctcgagcacgacaaggcctacgaccagcagctcaaagcgggtgacaatccgtacctgcggtataaccacgccgacgccgagtttcaggagcgtctgcaagaagatacgtcttttgggggcaacctcgggcgagcagtcttccaggccaagaagcgggttctcgaaccttttggtctggttgaggaaggcgctaagacggctcctggaaagaaacgtccggtagagcagtcgccacaagagccagactcctcctcgggcatcggcaagacaggccagcagcccgctaaaaagagactcaattttggtcagactggcgactcagagtcagtccccgacccacaacctctcggagaacctccagcaacccccgctgctgtgggacctactacaatggcttcaggcggtggcgcaccaatggcagacaataacgaaggcgccgacggagtgggtaatgcctcaggaaattggcattgcgattccacatggctgggcgacagagtcatcaccaccagcacccgcacctgggccttgcccacctacaataaccacctctacaagcaaatctccagtgcttcaacgggggccagcaacgacaaccactacttcggctacagcaccccctgggggtattttgatttcaacagattccactgccacttttcaccacgtgactggcagcgactcatcaacaacaattggggattccggcccaagagactcaacttcaagctcttcaacatccaagtcaaggaggtcacgacgaacgatggcgtcacgaccatcgctaataaccttaccagcacggttcaagtcttctcggattcagagtaccaactgccgtacgtcctcggctctgcgcaccagggctgcctccctccgttcccggcggacgtgttcatgattccgcagtacggctacctaacgctcaacaatggcagccaggccgtgggacgttcatccttttactgcctggaatatttcccttctcagatgctgagaacgggcaacaactttaccttcagctacacctttgaggaagtgcctttccacagcagctacgcgcacagccagagcctggaccggctgatgaatcctctcatcgaccaatacctgtattacctgaacagaactcaaaatcagtccggaagtgcccaaaacaaggacttgctgtttagccgtgggtctccagctggcatgtctgttcagcccaaaaactggctacctggaccctgttatcggcagcagcgcgtttctaaaacaaaaacagacaacaacaacagcaattttacctggactggtgcttcaaaatataacctcaatgggcgtgaatccatcatcaaccctggcactgctatggcctcacacaaagacgacgaagacaagttctttcccatgagcggtgtcatgatttttggaaaagagagcgccggagcttcaaatactgcattggacaatgtcatgatcacagatgaagaggaaattaaagccactaaccctgtggccaccgaaagatttgggaccgtggcagtcaatttccagagcagcagcacagaccccgcgaccggagatgtgcatgttatgggagccttacctggcatggtgtggcaagacagagacgtatacctgcagggtcccatttgggccaaaattcctcacacggatggacactctcacccgtctcctctcatgggcggctttggacttaagcacccgcctcctcaaatcctcatcaaaaacacgcctgttcctgcgaatcctccggcagagttttcggctacaaagtttgcttcattcatcacccagtactccacaggacaagtgagtgtggaaattgaatgggagctgcagaaagaaaacagcaagcgctggaatcccgaagtgcagtacacatccaattatgcaaaatctgccaacgttgatttcactgtggacaacaatggactttatactgagcctcgccccattggcacccgttaccttacccgtcccttg

SEQ ID NO: 699 - protein, 736 aa, Artificial Sequence
  Description of Artificial Sequence: Synthetic polypeptide
MAADGYLPDWLEDNLSEGIREWWDLKPGAPKPKANQQKQDDGRGLVLPGYKYLGPFNGLDKGEPVNAADAAALEHDKAYDQQLKAGDNPYLRYNHADAEFQERLQEDTSFGGNLGRAVFQAKKRVLEPFGLVEEGAKTAPGKKRPVEQSPQEPDSSSGIGKTGQQPAKKRLNFGQTGDSESVPDPQPLGEPPATPAAVGPTTMASGGGAPMADNNEGADGVGNASGNWHCDSTWLGDRVITTSTRTWALPTYNNHLYKQISSASTGASNDNHYFGYSTPWGYFDFNRFHCHFSPRDWQRLINNNWGFRPKRLNFKLFNIQVKEVTTNDGVTTIANNLTSTVQVFSDSEYQLPYVLGSAHQGCLPPFPADVFMIPQYGYLTLNNGSQAVGRSSFYCLEYFPSQMLRTGNNFTFSYTFEEVPFHSSYAHSQSLDRLMNPLIDQYLYYLNRTQNQSGSAQNKDLLFSRGSPAGMSVQPKNWLPGPCYRQQRVSKTKTDNNNSNFTWTGASKYNLNGRESIINPGTAMASHKDDEDKFFPMSGVMIFGKESAGASNTALDNVMITDEEEIKATNPVATERFGTVAVNFQSSSTDPATGDVHVMGALPGMVWQDRDVYLQGPIWAKIPHTDGHSHPSPLMGGFGLKHPPPQILIKNTPVPANPPAEFSATKFASFITQYSTGQVSVEIEWELQKENSKRWNPEVQYTSNYAKSANVDFTVDNNGLYTEPRPIGTRYLTRPL

SEQ ID NO: 700 - DNA, 2208 bp, Artificial Sequence
  Description of Artificial Sequence: Synthetic polynucleotide
atggctgccgatggttatcttccagattggctcgaggacaacctctctgagggcattcgcgagtggtgggacttgaaacctggagccccgaaacctaaagccaaccagcaaaagcaggacgacggccggggtctggtgcttcctggctacaagtacctcggacccttcaacggactcgacaagggggagcccgtcaacgcggcggacgcagcggccctcgagcacgacaaggcctacgaccagcagctcaaagcgggtgacaatccgtacctgcggtataaccacgccgacgccgagtttcaggagcgtctgcaagaagatacgtcttttgggggcaacctcgggcgagcagtcttccaggccaagaagcgggttctcgaaccttttggtctggttgaggaaggcgctaagacggctcctggaaagaaacgtccggtagagcagtcgccacaagagccagactcctcctcgggcatcggcaagacaggccagcagcccgctaaaaagagactcaattttggtcagactggcgactcagagtcagtccccgacccacaacctctcggagaacctccagcaacccccgctgctgtgggacctactacaatggcttcaggcggtggcgcaccaatggcagacaataacgaaggcgccgacggagtgggtaatgcctcaggaaattggcattgcgattccacatggctgggcgacagagtcatcaccaccagcacccgcacctgggccttgcccacctacaataaccacctctacaagcaaatctccagtgcttcaacgggggccagcaacgacaaccactacttcggctacagcaccccctgggggtattttgatttcaacagattccactgccacttttcaccacgtgactggcagcgactcatcaacaacaattggggattccggcccaagagactcaacttcaagctcttcaacatccaagtcaaggaggtcacgacgaacgatggcgtcacgaccatcgctaataaccttaccagcacggttcaagtcttctcggattcagagtaccaactgccgtacgtcctcggctctgcgcaccagggctgcctccctccgttcccggcggacgtgttcatgattccgcagtacggctacctaacgctcaacaatggcagccaggccgtgggacgttcatccttttactgcctggaatatttcccttctcagatgctgagaacgggcaacaactttaccttcagctacacctttgaggaagtgcctttccacagcagctacgcgcacagccagagcctggaccggctgatgaatcctctcatcgacctatacctgtattacctgaacagaactcaaaatcagtccggaagtgcccaaaacaaggacttgctgtttagccgtgggtctccagctggcatgtctgttcagcccaaaaactggctacctggaccctgttatcggcagcagcgcgtttctaaaacaaaaacagacaacaacaacagcaattttacctggactggtgcttcaaaatataacctcaatgggcgtgaatccatcatcaaccctggcactgctatggcctcacacaaagacgacgaagacaagttctttcccatgagcggtgtcatgatttttggaaaagagagcgccggaacttcaaatactgcattggacaatgtcatgatcacagatgaagaggaaattaaagccactaaccctgtggccaccgaaagatttgggaccgtggcagtcaatttccagagcagcagcacagaccccgcgaccggagatgtgcatgttatgggagccttacctggcatggtgtggcaagacagagacgtatacctgcagggtcccatttgggccaaaattcctcacacggatggacactttcacccgtctcctctcatgggcggctttggacttaagcacccgcctcctcaaatcctcatcaaaaacacgcctgttcctgcgaatcctccggcagagttttcggctacaaagtttgcttcattcatcacccagtactccacaggacaagtgagtgtggaaattgaatgggagctgcagaaagaaaacagcaagcgctggaatcccgaagtgcagtacacatccaattatgcaaaatctgccaacgttgatttcactgtggacaacaatggactttatactgagcctcgccccattggcacccgttaccttacccgtcccttg

SEQ ID NO: 701 - protein, 736 aa, Artificial Sequence
  Description of Artificial Sequence: Synthetic polypeptide
MAADGYLPDWLEDNLSEGIREWWDLKPGAPKPKANQQKQDDGRGLVLPGYKYLGPFNGLDKGEPVNAADAAALEHDKAYDQQLKAGDNPYLRYNHADAEFQERLQEDTSFGGNLGRAVFQAKKRVLEPFGLVEEGAKTAPGKKRPVEQSPQEPDSSSGIGKTGQQPAKKRLNFGQTGDSESVPDPQPLGEPPATPAAVGPTTMASGGGAPMADNNEGADGVGNASGNWHCDSTWLGDRVITTSTRTWALPTYNNHLYKQISSASTGASNDNHYFGYSTPWGYFDFNRFHCHFSPRDWQRLINNNWGFRPKRLNFKLFNIQVKEVTTNDGVTTIANNLTSTVQVFSDSEYQLPYVLGSAHQGCLPPFPADVFMIPQYGYLTLNNGSQAVGRSSFYCLEYFPSQMLRTGNNFTFSYTFEEVPFHSSYAHSQSLDRLMNPLIDLYLYYLNRTQNQSGSAQNKDLLFSRGSPAGMSVQPKNWLPGPCYRQQRVSKTKTDNNNSNFTWTGASKYNLNGRESIINPGTAMASHKDDEDKFFPMSGVMIFGKESAGTSNTALDNVMITDEEEIKATNPVATERFGTVAVNFQSSSTDPATGDVHVMGALPGMVWQDRDVYLQGPIWAKIPHTDGHFHPSPLMGGFGLKHPPPQILIKNTPVPANPPAEFSATKFASFITQYSTGQVSVEIEWELQKENSKRWNPEVQYTSNYAKSANVDFTVDNNGLYTEPRPIGTRYLTRPL

SEQ ID NO: 702 - DNA, 2208 bp, Artificial Sequence
  Description of Artificial Sequence: Synthetic polynucleotide
atggctgccgatggttatcttccagattggctcgaggacagcctctctgagggcattcgcgagtggtgggacttgaaacctggagccccgaaacctaaagccaaccagcaaaagcaggacgacggccggggtctggtgcttcctggctacaagtacctcggacccttcaacggactcgacaagggggagcccgtcaacgcggcggacgcagcggccctcgagcacgacaaggcctacgaccagcagctcaaagcgggtgacaatccgtacctgcggtataaccacgccgacgccgagtttcaggagcgtctgcaagaagatacgtcttttgggggcaacctcgggcgagcagtcttccaggccaagaagcgggttctcgaaccttttggtctggttgaggaaggcgctaagacggctcctggaaagaaacgtccggtagagcagtcgccacaagagccagactcctcctcgggcatcggcaagacaggccagcagcccgctaaaaagagactcaattttggtcagactggcgactcagagtcagtccccgacccacaacctctcggagaacctccagcaacccccgctgctgtgggacctactacgatggcttcaggcggtggcgcaccaatggcagacaataacgaaggcgccgacggagtgggtaatgcctcaggaaattggcattgcgattccacatggctgggcgacagagtcatcaccaccagcacccgcacctgggccttgcccacctacaataaccacctctacaagcaaatctccagtgcttcaacgggggccagcaacgacaaccactacttcggctacagcaccccctgggggtattttgatttcaacagattccactgccacttttcaccacgtgactggcagcgactcatcaacaacaattggggattccggcccaagagactcaacttcaagctcttcaacatccaagtcaaggaggtcacgacgaacgatggcgtcacgaccatcgctaataaccttaccagcacggttcaagtcttctcggattcagagtaccaactgccgtacgtcctcggctctgcgcaccagggctgcctccctccgttcccggcggacgtgttcatgattccgcagtacggctacctaacgcccaacaatggcagccaggccgtgggacgttcatccttttactgcctggaatatttcccttctcagatgctgagaacgggcaacaactttaccttcagctacacctttgaggaagtgcctttccacagcagctacgcgcacagccagagcctggaccggctgatgaatcctctcatcgaccaataccagtattacctgaacagaactcaaaatcagtccggaagtgcccaaaacaaggacttgctgtttagccgtgggtctccagctggcatgtctgttcagcccaaaaactggctacctggaccctgttatcggcagcagcgcgtttctaaaacaaaaacagacaacaacaacagcaattttacctggactggtgcttcaaaatataacctcaatgggcgtgaatccatcatcaaccctggcactgctatggcctcacacaaagacgacgaagacaagttctttcccatgagcggtgtcatgatttttggaaaagagagcgccggagcttcaaatactgcattggacaatgtcatgatcacagatgaagaggaaattaaagccactaaccctgtggccaccgaaagatttgggaccgtggcagtcaatttccagagcagcagcacagaccccgcgaccggagatgtgcatgttatgggagccttacctggcatggtgtggcaagacagagacgtatacctgcagggtcccatttgggccaaaattcctcacacggatggacactttcacccgtctcctctcatgggcggctttggacttaagcacccgcctcctcaaatcctcatcaaaaacacgcctgttcctgcgaatcctccggcagagttttcggctacaaagtttgcttcattcatcacccagtactccacaggacaagtgagtgtggaaattgaatgggagctgcagaaagaaaacagcaagcgctggaatcccgaagtgcagtacacatccaattatgcaaaatctgccaacgttgatttcactgtggacaacaatggactttatactgagcctcgccccattggcacccgttaccttacccgtcccttg

SEQ ID NO: 703 - protein, 736 aa, Artificial Sequence
  Description of Artificial Sequence: Synthetic polypeptide
MAADGYLPDWLEDSLSEGIREWWDLKPGAPKPKANQQKQDDGRGLVLPGYKYLGPFNGLDKGEPVNAADAAALEHDKAYDQQLKAGDNPYLRYNHADAEFQERLQEDTSFGGNLGRAVFQAKKRVLEPFGLVEEGAKTAPGKKRPVEQSPQEPDSSSGIGKTGQQPAKKRLNFGQTGDSESVPDPQPLGEPPATPAAVGPTTMASGGGAPMADNNEGADGVGNASGNWHCDSTWLGDRVITTSTRTWALPTYNNHLYKQISSASTGASNDNHYFGYSTPWGYFDFNRFHCHFSPRDWQRLINNNWGFRPKRLNFKLFNIQVKEVTTNDGVTTIANNLTSTVQVFSDSEYQLPYVLGSAHQGCLPPFPADVFMIPQYGYLTPNNGSQAVGRSSFYCLEYFPSQMLRTGNNFTFSYTFEEVPFHSSYAHSQSLDRLMNPLIDQYQYYLNRTQNQSGSAQNKDLLFSRGSPAGMSVQPKNWLPGPCYRQQRVSKTKTDNNNSNFTWTGASKYNLNGRESIINPGTAMASHKDDEDKFFPMSGVMIFGKESAGASNTALDNVMITDEEEIKATNPVATERFGTVAVNFQSSSTDPATGDVHVMGALPGMVWQDRDVYLQGPIWAKIPHTDGHFHPSPLMGGFGLKHPPPQILIKNTPVPANPPAEFSATKFASFITQYSTGQVSVEIEWELQKENSKRWNPEVQYTSNYAKSANVDFTVDNNGLYTEPRPIGTRYLTRPL

SEQ ID NO: 704 - DNA, 2205 bp, Artificial Sequence
  Description of Artificial Sequence: Synthetic polynucleotide
atgactgacggttaccttccagattggctagaggacaacctctctgagggcgttcgagagtggtgggcgctgcaacctggagcccctaaacccaaggcaaatcaacaacatcaggacaacgctcggggtcttgtgcttccgggttacaaatacctcggacccggcaacggactcgacaagggggaacccgtcaacgcagcggacgcggcagccctcgagcacgacaaggcctacgaccagcagctcaaggccggtgacaacccctacctcaagtacaaccacgccgacgcggagttccagcagcggcttcagggcgacacatcgtttgggggcaacctcggcagagcagtcttccaggccaaaaagagggttcttgaacctcttggtctggttgagcaagcgggtgagacggctcctggaaagaagagaccgttgattgaatccccccagcagcccgactcctccacgggtatcggcaaaaaaggcaagcagccggctaaaaagaagctcgttttcgaagacgaaactggagcaggcgacggaccccctgagggatcaacttccggagccatgtctgatgacagtgagatgcgtgcagcaactggcggagctgcagtcgagggcggacaaggtgccgatggagtgggtaatgcctcgggtgattggcattgcgattccacctggtctgagggccacgtcacgaccaccagcaccagaacctgggtcttgcccacctacaacaaccacctctacaagcgactcggagagagcctgcagtccaacacctacaacggattctccaccccctggggatactttgacttcaaccgcttccactgccacttctcaccacgtgactggcagcgactcatcaacaacaactggggcatgcgacccaaagccatgcgggtcaaaatcttcaacatccaggtcaaggaggtcacgacgtcgaacggcgagacaacggtggctaataaccttaccagcacggttcagatctttgcggactcgtcgtacgaactgccgtacgtgatggatgcgggtcaagagggcagcctgcctccttttcccaacgacgtctttatggtgccccagtacggctactgtggactggtgaccggcaacacttcgcagcaacagactgacagaaatgccttctactgcctggagtactttccttcgcagatgctgcggactggcaacaactttgaaattacgtacagttttgagaaggtgcctttccactcgatgtacgcgcacagccagagcctggaccggctgatgaaccctctcatcgaccagtacctgtggggactgcaatcgaccaccaccggaaccaccctgaatgccgggactgccaccaccaactttaccaagctgcggcctaccaacctttccaactttaaaaagaactggctgcccgggccttcaatcaagcagcagggcttctcaaagactgccaatcaaaactacaagatccctgccaccgggtcagacagtctcatcaaatacgagacgcacagcactctggacggaagatggagtgccctgacccccggacctccaatggccacggctggacctgcggacagcaagttcagcaacagccagctcatctttgcggggcctaaacagaacggcaacacggccaccgtacccgggactctgatcttcacctctgaggaggagctggcagccaccaacgctaccgatacggacatgtggggcaacctacctggcggtgaccagagcaacagcaacctgccgaccgtggacagactgacagccttgggagccgtgcctggaatggtctggcaaaacagagacatttactaccagggtcccatttgggccaagattcctcataccgatggacactttcacccctcaccgctgattggtgggtttgggctgaaacacccgcctcctcaaatttttatcaagaacaccccggtacctgcgaatcctgcgacgaccttcagctctactccggtaaactccttcattactcagtacagcactggccaggtgtcggtgcagattgactgggagatccagaaggagcggtccaaacgctggaaccccgaggtccagtttacctccaactacggacagcaaaactctctgttgtgggctcccgatgcggctgggaaatacactgagcctagggctatcggtacccgctacctcacccaccacctgtaa

SEQ ID NO: 705 - protein, 734 aa, Artificial Sequence
  Description of Artificial Sequence: Synthetic polypeptide
MTDGYLPDWLEDNLSEGVREWWALQPGAPKPKANQQHQDNARGLVLPGYKYLGPGNGLDKGEPVNAADAAALEHDKAYDQQLKAGDNPYLKYNHADAEFQQRLQGDTSFGGNLGRAVFQAKKRVLEPLGLVEQAGETAPGKKRPLIESPQQPDSSTGIGKKGKQPAKKKLVFEDETGAGDGPPEGSTSGAMSDDSEMRAATGGAAVEGGQGADGVGNASGDWHCDSTWSEGHVTTTSTRTWVLPTYNNHLYKRLGESLQSNTYNGFSTPWGYFDFNRFHCHFSPRDWQRLINNNWGMRPKAMRVKIFNIQVKEVTTSNGETTVANNLTSTVQIFADSSYELPYVMDAGQEGSLPPFPNDVFMVPQYGYCGLVTGNTSQQQTDRNAFYCLEYFPSQMLRTGNNFEITYSFEKVPFHSMYAHSQSLDRLMNPLIDQYLWGLQSTTTGTTLNAGTATTNFTKLRPTNLSNFKKNWLPGPSIKQQGFSKTANQNYKIPATGSDSLIKYETHSTLDGRWSALTPGPPMATAGPADSKFSNSQLIFAGPKQNGNTATVPGTLIFTSEEELAATNATDTDMWGNLPGGDQSNSNLPTVDRLTALGAVPGMVWQNRDIYYQGPIWAKIPHTDGHFHPSPLIGGFGLKHPPPQIFIKNTPVPANPATTFSSTPVNSFITQYSTGQVSVQIDWEIQKERSKRWNPEVQFTSNYGQQNSLLWAPDAAGKYTEPRAIGTRYLTHHL

SEQ ID NO: 706 - DNA, 2205 bp, Artificial Sequence
  Description of Artificial Sequence: Synthetic polynucleotide
atgactgacggttaccttccagattggctagaggacaacctctctgaaggcgttcgagagtggtgggcgctgcaacctggagcccctaaacccaaggcaaatcaacaacatcaggacaacgctcggggtcttgtgcttccgggttacaaatacctcggacccggcaacggactcgacaagggggaacccgtcaacgcagcggacgcggcagccctcgagcacgacaaggcctacgaccagcagctcaaggccggtgacaacccctacctcaagtacaaccacgccgacgcggagttccagcagcggcttcagggcgacacatcgtttgggggcaacctcggcagagcagtcttccaggccaaaaagagggttcttgaacctcttggtctggttgagcaagcgggtgagacggctcctggaaagaagagaccgttgattgaatccccccagcagcccgactcctccacgggtatcggcaaaaaaggcaagcagccggctaaaaagaagctcgttttcgaagacgaaactggagcaggcgacggaccccctgagggatcaacttccggagccatgtctgatgacagtgagatgcgtgcagcagctggcggagctgcagtcgagggcggacaaggtgccgatggagtgggtaatgcctcgggtgattggcattgcgattccacctggtctgagggccacgtcacgaccaccagcaccagaacctgggtcttgcccacctacaacaaccacctctacaagcgactcggagagagcctgcagtccaacacctacaacggattctccaccccctggggatactttgacttcaaccgcttccactgccacttcttaccacgtgactggcagcgactcatcaacaacaactggggcgtgcgacccaaagccatgcgggtcaaaatcttcaacatccaggtcaaggaggtcacgacgtcgaacggcgagacaacggtggctaataaccttaccagcacggttcagatctttgcggactcgtcgtacgaactgccgtacgtgatggatgcgggtcaagagggcagcctgcctccttttcccaacgacgtctttatggtgccccagtacggctactgtggactggtgaccggcgacacttcgcagcaacagactgacagaaatgccttctactgcctggagtactttccttcgcagatgctgcggactggcaacaactttgaaattacgtacagttttgagaaggtgcctttccactcgatgtacgcgcacagccagagcctggaccggctgatgaaccctctcatcgaccagtacctgtggggactgcaatcgaccaccaccggaaccaccctgaatgccgggactgccaccaccaactttaccaagctgcggcctaccaacttttccaactttaaaaagaactggctgcccgggccttcaatcaagcagcagggcttctcaaagactgccaatcaaaactacaagatccctgccaccgggtcagacagtctcatcaaatacgagacgcacagcactctggacggaagatggagtgccctgacccccggacctccaatggccacggctggacctgcggacagcaagttcagcaacagccagctcatctttgcggggcctaaacagaacggcaacacggccaccgtacccgggactctgatcttcacctctgaggaggagctggcagccaccaacgccaccgatacggacatgtggggcaacctacctggcggtgaccagagcaacagcaacctgccgaccgtggacagactgacagccttgggagccgtgcctggaatggtctggcaaaacagagacatttactaccagggtcccatttgggccaagattcctcataccgatggacactttcacccctcaccgctgattggtgggtttgggctgaaacacccgcctcctcaaatttttatcaagaacaccccggtacctgcgaatcctgcgacgaccttcagctctactccggtaaactccttcattactcagtacagcactggccaggtgtcggtgcagattgactgggagatccagaaggagcggtccaaacgctggaaccccgaggtccagtttacctccaactacggacagcaaaactctctgttgtgggctcccgatgcggctgggaaatacactgagcctagggctatcggtacccgctacctcacccaccacctgtaa

SEQ ID NO: 707 - protein, 734 aa, Artificial Sequence
  Description of Artificial Sequence: Synthetic polypeptide
MTDGYLPDWLEDNLSEGVREWWALQPGAPKPKANQQHQDNARGLVLPGYKYLGPGNGLDKGEPVNAADAAALEHDKAYDQQLKAGDNPYLKYNHADAEFQQRLQGDTSFGGNLGRAVFQAKKRVLEPLGLVEQAGETAPGKKRPLIESPQQPDSSTGIGKKGKQPAKKKLVFEDETGAGDGPPEGSTSGAMSDDSEMRAAAGGAAVEGGQGADGVGNASGDWHCDSTWSEGHVTTTSTRTWVLPTYNNHLYKRLGESLQSNTYNGFSTPWGYFDFNRFHCHFLPRDWQRLINNNWGVRPKAMRVKIFNIQVKEVTTSNGETTVANNLTSTVQIFADSSYELPYVMDAGQEGSLPPFPNDVFMVPQYGYCGLVTGDTSQQQTDRNAFYCLEYFPSQMLRTGNNFEITYSFEKVPFHSMYAHSQSLDRLMNPLIDQYLWGLQSTTTGTTLNAGTATTNFTKLRPTNFSNFKKNWLPGPSIKQQGFSKTANQNYKIPATGSDSLIKYETHSTLDGRWSALTPGPPMATAGPADSKFSNSQLIFAGPKQNGNTATVPGTLIFTSEEELAATNATDTDMWGNLPGGDQSNSNLPTVDRLTALGAVPGMVWQNRDIYYQGPIWAKIPHTDGHFHPSPLIGGFGLKHPPPQIFIKNTPVPANPATTFSSTPVNSFITQYSTGQVSVQIDWEIQKERSKRWNPEVQFTSNYGQQNSLLWAPDAAGKYTEPRAIGTRYLTHHL

SEQ ID NO: 708 - DNA, 2205 bp, Artificial Sequence
  Description of Artificial Sequence: Synthetic polynucleotide
atgactgacggttaccttccagattggctagaggacaacctctctgaaggcgttcgagagtggtgggcgctgcaacctggagcccctaaacccaaggcaaatcaacaacatcaggacaacgctcggggtcttgtgcttccgggttacaaatacctcggacccggcaacggactcgacgagggggaacccgtcaacgcagcggacgcggcagccctcgagcacgacaaggcctacgaccagcagctcaaggccggtgacaacccctacctcaagtacaaccacgccgacgcggagttccagcagcggcttcagggcgacacatcgtttgggggcaacctcggcagagcagtcttccaggccaaaaagagggttcttgaacctcttggtctggttgagcaagcgggtgagacggctcctggaaagaagagaccgttgattgaatccccccagcagcccgactcctccacgggtatcggcaaaaaaggcaagcagccggctaaaaagaagctcgttttcgaagacgaaactggagcaggcgacggaccccctgagggatcaacttccggagccatgtctgatgacagtgagatgcgtgcagcagctggcggagctgcagtcgagggcggacaaggtgccgatggagtgggtaatgcctcgggtgattggcattgcgattccacctggtctgagggccacgtcacgaccaccagcaccagaacctgggtcttgcccacctacaacaaccacctctacaagcgactcggagagagcctgcagtccaacacctacaacggattctccaccccctggggatactttgacttcaaccgcttccactgccacttctcaccacgtgactggcagcgactcatcaacaacaactggggcatgcgacccaaagccatgcgggtcaaaatcttcaacatccaggtcaaggaggtcacgacgtcgaacggcgagacaacggtggctaataaccttaccagcacggttcagatctttgcggactcgtcgtacgaactgccgtacgtgatggatgcgggtcaagagggcagcctgcctccttttcccaacgacgtctttatggtgccccagtacggctactgtggactggtgaccggcaacacttcgcagcaacagactgacagaaatgccttctactgcctggagtactttccttcgcagatgctgcggactggcaacaactttgaaattacgtacagttttgagaaggtgcctttccactcgatgtacgcgcacagccagagcctggaccggctgatgaaccctctcatcgaccagtacctgtggggactgcaatcgaccaccaccggaaccaccctgaatgccgggactgccaccaccaactttaccaagctgcggcctaccaacttttccaactttaaaaagaactggctgcccgggccttcaatcaagcagcagggcttctcaaagactgccaatcaaaactacaagatccctgccaccgggtcagacagtctcatcaaatacgagacgcacagcactctggacggaagatggagtgccctgacccccggacctccaatggccacggctggacctgcggacagcaagttcagcaacagccagctcatctttgcggggcctaaacagaacggcaacacggccaccgtacccgggactctgatcttcacctctgaggaggagctggcagccaccaacgctaccgatacggacatgtggggcaacctacctggcggtgaccagagcaacagcaacctgccgaccgtggacagactgacagccttgggagccgtgcctggaatggtctggcaaaacagagacatttactaccagggtcccatttgggccaagattcctcataccgatggacactttcacccctcaccgctgattggtgggtttgggctgaaacacccgcctcctcaaatttttatcaagaacaccccggtacctgcgaatcctgcgacgaccttcagctctactccggtaaactccttcattactcagtacagcactggccaggtgtcggtgcagattgactgggagatccagaaggagcggtccaaacgctggaaccccgaggtccagtttacctccaactacggacagcaaaactctctgttgtgggctcccgatgcggctgggaaatacactgagcctagggctatcggtacccgctacctcacccaccacctgtaa

SEQ ID NO: 709 - protein, 734 aa, Artificial Sequence
  Description of Artificial Sequence: Synthetic polypeptide
MTDGYLPDWLEDNLSEGVREWWALQPGAPKPKANQQHQDNARGLVLPGYKYLGPGNGLDEGEPVNAADAAALEHDKAYDQQLKAGDNPYLKYNHADAEFQQRLQGDTSFGGNLGRAVFQAKKRVLEPLGLVEQAGETAPGKKRPLIESPQQPDSSTGIGKKGKQPAKKKLVFEDETGAGDGPPEGSTSGAMSDDSEMRAAAGGAAVEGGQGADGVGNASGDWHCDSTWSEGHVTTTSTRTWVLPTYNNHLYKRLGESLQSNTYNGFSTPWGYFDFNRFHCHFSPRDWQRLINNNWGMRPKAMRVKIFNIQVKEVTTSNGETTVANNLTSTVQIFADSSYELPYVMDAGQEGSLPPFPNDVFMVPQYGYCGLVTGNTSQQQTDRNAFYCLEYFPSQMLRTGNNFEITYSFEKVPFHSMYAHSQSLDRLMNPLIDQYLWGLQSTTTGTTLNAGTATTNFTKLRPTNFSNFKKNWLPGPSIKQQGFSKTANQNYKIPATGSDSLIKYETHSTLDGRWSALTPGPPMATAGPADSKFSNSQLIFAGPKQNGNTATVPGTLIFTSEEELAATNATDTDMWGNLPGGDQSNSNLPTVDRLTALGAVPGMVWQNRDIYYQGPIWAKIPHTDGHFHPSPLIGGFGLKHPPPQIFIKNTPVPANPATTFSSTPVNSFITQYSTGQVSVQIDWEIQKERSKRWNPEVQFTSNYGQQNSLLWAPDAAGKYTEPRAIGTRYLTHHL

SEQ ID NO: 710 - DNA, 2208 bp, Artificial Sequence
  Description of Artificial Sequence: Synthetic polynucleotide
atggctgccgatggttatcttccagattggctcgaggacaaccttagtgaaggaattcgcgagtggtgggctttgaaacctggagcccctcaacccaaggcaaatcaacaacatcaagacaacgctcgaggtcttgtgcttccgggttacaaataccttggacccggcaacggactcgacaagggggagccggtcaacgcagcagacgcggcggccctcgtgcacgacaaggcctacgaccagcagctcaaggccggagacaacccgtacctcaagtgcaaccacgccgacgccgagttccaggagcggctcaaagaagatacgtcttttgggggcaacctcgggcgagcagtcttccaggccaaaaagaggcttcttgaacctcttggtctggttgaggaagcggctaagacggctcctggaaagaagaggcctgtagagcagtctcctcaggaaccggactcctccgcgggtattggcaaatcgggtgcacagcccgctaaaaagagactcaatttcggtcagactggcgacacagagtcagtcccagaccctcaaccaatcggagaacctcccgcagccccctcaggtgtgggatctcttacaatggcttcaggtggtggcgcaccagtggcagacaataacgaaggtgccgatggagtgggtagttcctcgggaaattggcattgcgattcccaatggctgggggacagagtcatcaccaccagcacccgaacctgggccctgcccacctacaacaatcacctctacaagcaaatctccaacagcacatctggaggatcttcaaatgacaacgcctacctcggctacagcaccccctgggggtattttgacttcaacagattccactgccacttctcaccacgtgactggcagcgactcatcaacaacaactggggattccggcctaagcgactcaacttcaagctcttcaacattcaggtcaaagaggttacggacaacaatggagtcaagaccatcgccaataaccttaccagcacggtccaggtcttcacggactcagactatcagctcccgtacgtgctcgggtcggctcacgagggctgcctcccgccgttcccagcggacgttttcacgattcctcagtacgggtatctgacgcttaatgatggaagccaggccgtgggtcgttcgtccttttactgcctggaatatttcccgtcgcaaatgctaagaacgggtaacaacttccagttcagctacgagtttgagaacgtacctttccatagcagctacgctcacagccaaagcctggaccgactaatgaatccactcatcgaccaatacttgtactatctctcaaagactattaacggttctggacagaatcaacaaacgctaaaattcagtgtggccggacccagcaacatggctgtccagggaagaaactacatacctggacccagctaccgacaacaacgtgtctcaaccactgtgactcaaaacaacaacagcgaatttgcttggcctggagcttcttcttgggctctcaatggacgtaatagcttgatgaatcctggacctgctatggccagccacaaagaaggagaggaccgtttctttcctttgtctggatctttaatttttggcaaacaaggaactggaagagacaacgtggatgcggacaaagtcatgataaccaacgaagaagaaattaaaactactaacccggtagcaacggagtcctatggacaagtggccacaaaccaccagagtgcccaagcacaggcgcagaccggctgggttcaaaaccaaggaatacttccgggtatggtttggcaggacagagatgtgtacctgcaaggacccatttgggccaaaattcctcacacggacggcaactttcacccttctccgctgatgggagggtttggaatgaagcacccgcctcctcagatcctcatcaaaaacacacctgtacctgcggatcctccaacggccttcaacaaggacaagctgaactctttcatcacccagtattctactggccaagtcagcgtggagatcgagtgggagctgcagaaggaaaacagcaagcgctggaacccggagatccagtacacttccaactattacaagtctaataatgttgaatttgctgttaatactgaaggtgtatatagtgaaccccgccccattgggccccgatacctgactcgtaatttt

SEQ ID NO: 711 - protein, 736 aa, Artificial Sequence
  Description of Artificial Sequence: Synthetic polypeptide
MAADGYLPDWLEDNLSEGIREWWALKPGAPQPKANQQHQDNARGLVLPGYKYLGPGNGLDKGEPVNAADAAALVHDKAYDQQLKAGDNPYLKCNHADAEFQERLKEDTSFGGNLGRAVFQAKKRLLEPLGLVEEAAKTAPGKKRPVEQSPQEPDSSAGIGKSGAQPAKKRLNFGQTGDTESVPDPQPIGEPPAAPSGVGSLTMASGGGAPVADNNEGADGVGSSSGNWHCDSQWLGDRVITTSTRTWALPTYNNHLYKQISNSTSGGSSNDNAYLGYSTPWGYFDFNRFHCHFSPRDWQRLINNNWGFRPKRLNFKLFNIQVKEVTDNNGVKTIANNLTSTVQVFTDSDYQLPYVLGSAHEGCLPPFPADVFTIPQYGYLTLNDGSQAVGRSSFYCLEYFPSQMLRTGNNFQFSYEFENVPFHSSYAHSQSLDRLMNPLIDQYLYYLSKTINGSGQNQQTLKFSVAGPSNMAVQGRNYIPGPSYRQQRVSTTVTQNNNSEFAWPGASSWALNGRNSLMNPGPAMASHKEGEDRFFPLSGSLIFGKQGTGRDNVDADKVMITNEEEIKTTNPVATESYGQVATNHQSAQAQAQTGWVQNQGILPGMVWQDRDVYLQGPIWAKIPHTDGNFHPSPLMGGFGMKHPPPQILIKNTPVPADPPTAFNKDKLNSFITQYSTGQVSVEIEWELQKENSKRWNPEIQYTSNYYKSNNVEFAVNTEGVYSEPRPIGPRYLTRNF

SEQ ID NO: 712 - DNA, 2208 bp, Artificial Sequence
  Description of Artificial Sequence: Synthetic polynucleotide
atggctgccgatggttatcttccagattggctcgaggacaaccttagtgaaggaattcgcgagtggtgggctttgaaacctggagcccctcaacccaaggcaaatcaacaacatcaagacaacgctcgaggtcttgtgcttccgggttacaaataccttggacccggcaacggactcgacaagggggagccggtcaacgcagcagacgcggcggccctcgagcacaacaaggcctacgaccagcagctcaaggccggagacaacccgtacctcaagtgcaaccacgccgacgccgagttccaggagcggctcaaagaagatacgtcttttgggggcaacctcgggcgagcagtcttccaggccaaaaagaggcttcttgaacctcttggtctggttgaggaagcggctaagacggctcctggaaagaagaggcctgtagagcagtctcctcaggaaccggactcctccgcgggtattggcaaatcgggtgcacagcccgctaaaaagagactcaatttcggtcagactggcgacacagagtcagtcccagaccctcaaccaatcggagaacctcccgcagccccctcaggtgtgagatctcttacaatggcttcaggtggtggcgcaccagtggcagacaataacgaaggtgccgatggagtgggtagttcctcgggaaattggcattgcgattcccaatggctgggggacagagtcatcaccaccagcacccgaacctgggccctgcccacctacaacaatcacctctacaagcaaatctccaacagcacatctggaggatcttcaaatgacaacgcctacctcggctacagcaccccctgggggtattttgacttcaacagattccactgccacttctcaccacgtgactggcagcgactcatcaacaacaactggggattccggcctaagcgactcaacttcaagctcttcaacattcaggtcaaagaggttacggacaacaatggagtcaagaccatcgccaataaccttaccagcacggtccaggtcttcacggactcagactatcagctcccgtacgtgctcgggtcggctcacgagggctgcctcccgccgttcccagcggacgttttcatgattcctcagtacgggtatctgacgcttaatgatggaagccaggccgtgggtcgttcgtccttttactgcctggaatatttcccgtcgcaaatgctaagaacgggtaacaacttccagttcagctacgagtttgagaacgtacctttccatagcagctacgctcacagccaaagcctggaccgactaatgaatccactcatcgaccaatacttgtactatctctcaaagactattaacggttctggacagaatcaacaaacgctaaaattcagtgtggccggacccagcaacatggctgtccagggaagaaactacatacctggacccagctaccgacaacaacgtgtctcaaccactgtgactcaaaacaacaacagcgaatttgcttggcctggagcttcttcttgggctctcaatggacgtaatagcttgatgaatcctggacctgctatggccagccacaaagaaggagaggaccgtttctttcctttgtctggatctttaatttttggcaaacaaggaactggaagagacaacgtggatgcggacaaagtcatgataaccaacgaagaagaaattaaaactactaacccggtagcaacggagtcctatggacaagtggccacaaaccaccagagtgcccaagcacaggcgcagaccggctgggttcaaaaccaaggaatacttccgggtatggtttggcaggacagagatgtgtacctgcaaggacccatttgggccaaaattcctcacacggacggcaactttcacccttctccgctgatgggagggtttggaatgaagcacccgcctcctcagatcctcatcaaaaacacacctgtacctgcggatcctccaacggccttcaacaaggacaagctgaactctttcatcacccagtattctactggccaagtcagcgtggagatcgagtgggagctgcagaaggaaaacagcaagcgctggaacccggagatccagtacacttccaactattacaagtctaataatgttgaatttgctgttaatactgaaggtgtatatagtgaaccccgccccattggcaccagatacctgactcgtaatctg

SEQ ID NO: 713 - protein, 736 aa, Artificial Sequence
  Description of Artificial Sequence: Synthetic polypeptide
MAADGYLPDWLEDNLSEGIREWWALKPGAPQPKANQQHQDNARGLVLPGYKYLGPGNGLDKGEPVNAADAAALEHNKAYDQQLKAGDNPYLKCNHADAEFQERLKEDTSFGGNLGRAVFQAKKRLLEPLGLVEEAAKTAPGKKRPVEQSPQEPDSSAGIGKSGAQPAKKRLNFGQTGDTESVPDPQPIGEPPAAPSGVRSLTMASGGGAPVADNNEGADGVGSSSGNWHCDSQWLGDRVITTSTRTWALPTYNNHLYKQISNSTSGGSSNDNAYLGYSTPWGYFDFNRFHCHFSPRDWQRLINNNWGFRPKRLNFKLFNIQVKEVTDNNGVKTIANNLTSTVQVFTDSDYQLPYVLGSAHEGCLPPFPADVFMIPQYGYLTLNDGSQAVGRSSFYCLEYFPSQMLRTGNNFQFSYEFENVPFHSSYAHSQSLDRLMNPLIDQYLYYLSKTINGSGQNQQTLKFSVAGPSNMAVQGRNYIPGPSYRQQRVSTTVTQNNNSEFAWPGASSWALNGRNSLMNPGPAMASHKEGEDRFFPLSGSLIFGKQGTGRDNVDADKVMITNEEEIKTTNPVATESYGQVATNHQSAQAQAQTGWVQNQGILPGMVWQDRDVYLQGPIWAKIPHTDGNFHPSPLMGGFGMKHPPPQILIKNTPVPADPPTAFNKDKLNSFITQYSTGQVSVEIEWELQKENSKRWNPEIQYTSNYYKSNNVEFAVNTEGVYSEPRPIGTRYLTRNL

SEQ ID NO: 714 - DNA, 2208 bp, Artificial Sequence
  Description of Artificial Sequence: Synthetic polynucleotide
atggctgccgatggttatcttccagattggctcgaggacaaccttagtgaaggaattcgcgagtggtgggctttgaaacctggagcccctcaacccaaggcaaatcaacaacatcaagacaacgctcgaggtcttgtgcttccgggttacaaataccttggacccggcaacggactcgacaagggggagccggtcaacgcagcagacgcggcggccctcgagcacgacaaggcctacgaccagcagctcaaggccggagacaacccgtacctcaagtgcaaccacgccgacgccgagttccaggagcggctcaaagaagatacgtcttttgggggcaacctcgggcgagcagtcttccaggccaaaaagaggcttcttgaacctcttggtctggttgaggaagcggctaagacggctcctggaaagaagaggcctgtagagcagtctcctcaggaaccggactcctccgcgggtattggcaaatcgggtgcacagcccgctaaaaagagactcaatttcggtcagactggcgacacagagtcagtcccagaccctcaaccaatcggagaacctcccgcagccccctcaggtgtgggatctcttacaatggcttcaggcggtggcgcaccagtggcagacaataacgaaggtgccgatggagtgggtagttcctcgggaaattggcattgcgattcccaatggctgggggacagagtcatcaccaccagcacccgaacctgggccctgcccacctacaacaatcacctctacaagcaaatctccaacagcacatctggaggatcttcaaatgacaacgcctacctcggctacagcaccccctgggggtattttgacttcaacagattccactgccacttctcaccacgtgactggcagcgactcatcaacaacaactggggattccggcctaagcgactcaacttcgagctcttcaacattcaggtcaaagaggttacggacaacaatggagtcaagaccatcgccaataaccttaccagcacggtccaggtcttcacggactcagactatcagctcccgtacgtgctcgggtcggctcacgagggctgcctcccgccgttcccagcggacgttttcatgattcctcagtacgggtatctgacgcttaatgatggaagccaggccgtgggtcgttcgtccttttactgcctggaatatttcccgtcgcaaatgctaagaacgggtaacaacttccagtccagctacgagtttgagaacgtacctttccatagcagctacgctcacagccaaagcctggaccgactaatgaatccactcatcgaccaatacttgtactatctctcaaagactattaacggttctggacagaatcaacaaacgctaaaattcagtgtggccggacccagcaacatggctgtccagggaagaaactacatacctggacccagctaccgacaacaacgtgcctcaaccactgtgactcaaaacaacaacagcgaatttgcttggcctggagcttcttcttgggctctcaatggacgtaatagcttgatgaatcctggacctgctatggccagccacaaagaaggggaggaccgtttctttcctttgtctggatctttaatttttggcaaacaaggaactggaagagacaacgtggatgcggacaaagtcatgataaccaacgaagaagaaattaaaactactaacccggtagcaacggagtcctatggacaagtggccacaaaccaccagagtgcccaagcacaggcgcagaccggctgggttcaaaaccaaggaatacttccgggtatggtttggcaggacagagatgtgtacctgcaaggacccatttgggccaaaattcctcacacggacggcaactttcacccttctccgctgatgggagggtttggaatgaagcacccgcctcctcagatcctcatcaaaaacacacctgtacctgcggatcctccaacggccttcaacaaggacaagctgaactctttcatcacccagtattctactggccaagtcagcgtggagatcgagtgggagctgcagaaggaaaacagcaagcgctggaacccggagatccagtacacttccaactattacaagtctaataatgttgaatttgctgttaatactgaaggtgtatatagtgaaccccgccccattggcaccagatacctgactcgtaatctg

SEQ ID NO: 715 - protein, 736 aa, Artificial Sequence
  Description of Artificial Sequence: Synthetic polypeptide
MAADGYLPDWLEDNLSEGIREWWALKPGAPQPKANQQHQDNARGLVLPGYKYLGPGNGLDKGEPVNAADAAALEHDKAYDQQLKAGDNPYLKCNHADAEFQERLKEDTSFGGNLGRAVFQAKKRLLEPLGLVEEAAKTAPGKKRPVEQSPQEPDSSAGIGKSGAQPAKKRLNFGQTGDTESVPDPQPIGEPPAAPSGVGSLTMASGGGAPVADNNEGADGVGSSSGNWHCDSQWLGDRVITTSTRTWALPTYNNHLYKQISNSTSGGSSNDNAYLGYSTPWGYFDFNRFHCHFSPRDWQRLINNNWGFRPKRLNFELFNIQVKEVTDNNGVKTIANNLTSTVQVFTDSDYQLPYVLGSAHEGCLPPFPADVFMIPQYGYLTLNDGSQAVGRSSFYCLEYFPSQMLRTGNNFQSSYEFENVPFHSSYAHSQSLDRLMNPLIDQYLYYLSKTINGSGQNQQTLKFSVAGPSNMAVQGRNYIPGPSYRQQRASTTVTQNNNSEFAWPGASSWALNGRNSLMNPGPAMASHKEGEDRFFPLSGSLIFGKQGTGRDNVDADKVMITNEEEIKTTNPVATESYGQVATNHQSAQAQAQTGWVQNQGILPGMVWQDRDVYLQGPIWAKIPHTDGNFHPSPLMGGFGMKHPPPQILIKNTPVPADPPTAFNKDKLNSFITQYSTGQVSVEIEWELQKENSKRWNPEIQYTSNYYKSNNVEFAVNTEGVYSEPRPIGTRYLTRNL

SEQ ID NO: 716 - DNA, 2208 bp, Artificial Sequence
  Description of Artificial Sequence: Synthetic polynucleotide
atggctgccgatggttatcttccagattggctcgaggacaaccttagtgaaggaattcgcgagtggtgggctttgaaacctggagcccctcaacccaaggcaaatcaacaacatcaagacaacgctcgaggtcttgtgcttccgggttacaaataccttggacccggcaacggactcgacaagggggagccggtcaacgcagcagacgcggcggccctcgagcacgacaaggcctacgaccagcagctcaaggccggagacaacccgtacctcaagtgcaaccacgccgacgccgagttccaggagcggctcaaagaagatacgtcttttgggggcaacctcgggcgagcagtcttccaggccaaaaagaggcttcttgaacctcttggtctggttgaggaagcggctaagacggctcctggaaagaagaggcctgtagagcagtctcctcaggaaccggactcctccgcgggtattggcaaatcgggtgcacagcccgctaaaaagagactcaatttcggtcagactggcgacacagagtcagtcccagaccctcaaccaatcggagaacctcccgcagcccccccaggtgtgggatctcttacaatggcttcaggtggtggcgcaccagtggcggacaataacgaaggtgccgatggagtgggtagttcctcgggaaattggcattgcgattcccaatggctgggggacagagtcatcaccaccagcacccgaacctgggccctgcccacctacaacaatcacctctacaagcaaatctccaacagcacatctggaggatcttcaaatgacaacgcctacctcggctacagcaccccctgggggtattttgacttcaacagattccactgccacttctcaccacgtgactggcagcgactcatcaacaacaactggggattccggcctaagcgactcaacttcaagctcttcaacattcaggtcaaagaggttacggacaacaatggagtcaagaccatcgccaataaccttaccagcacggtccaggtcttcacggactcagactatcagctcccgtacgtgctcgggtcggctcacgagggctgcctcccgccgttcccagcggacgttttcatgattcctcagtacgggtatctgacgcttaatgatggaagccaggccgtgggtcgttcgtccttttactgcctggaatatttcccgtcgcaaatgctaagaacgggtaacaacttccagttcagctacgagtttgagaacgtacctttccatagcagctacgctcacagccaaagcctggaccgactaatgaatccactcatcgaccaatacttgtactatctctcaaagactattagcggttctggacagaatcaacaaacgctaaaattcagtgtggccggacccagcaacatggctgtccagggaagaaactacatacctggacccagctaccgacaacaacgtgtctcaaccactgtgactcaaaacaacagcagcgaatttgcttggcctggagcttcttcttgggctctcaatggacgtaatagcttgatgaatcctggacctgctatggccagccacaaagaaggagaggaccgtttctttcctttgtctggatctttaatttttggcaaacaaggaactggaagagacaacgtggatgcggacaaagtcatgataaccaacgaagaagaaattaaaactactaacccggtagcaacggagtcctatggacaagtggccacaaaccaccagagtgcccaagcacaggcgcagaccggctgggttcaaaaccaaggaatactttcgggtatggtttggcaggacagagatgtgtacctgcaaggacccatttgggccaaaattcctcacacggacggcaactttcacccttctccgctgatgggagggtttggaatgaagcacccgcctcctcagatcctcatcaaaaacacacctgtacctgcggatcctccaacggccttcaacaaggacaagctgaactctttcatcacccagtattctactggccaagtcagcgtggagatcgagtgggagctgcagaaggaaaacagcaagcgctggaacccggagatccagtacacttccaactattacaagtctaataatgttgaatttgctgttaatactgaaggtgtatatagtgaaccccgccccattggcaccagatacctgactcgtaatctg

SEQ ID NO: 717 - protein, 736 aa, Artificial Sequence
  Description of Artificial Sequence: Synthetic polypeptide
MAADGYLPDWLEDNLSEGIREWWALKPGAPQPKANQQHQDNARGLVLPGYKYLGPGNGLDKGEPVNAADAAALEHDKAYDQQLKAGDNPYLKCNHADAEFQERLKEDTSFGGNLGRAVFQAKKRLLEPLGLVEEAAKTAPGKKRPVEQSPQEPDSSAGIGKSGAQPAKKRLNFGQTGDTESVPDPQPIGEPPAAPPGVGSLTMASGGGAPVADNNEGADGVGSSSGNWHCDSQWLGDRVITTSTRTWALPTYNNHLYKQISNSTSGGSSNDNAYLGYSTPWGYFDFNRFHCHFSPRDWQRLINNNWGFRPKRLNFKLFNIQVKEVTDNNGVKTIANNLTSTVQVFTDSDYQLPYVLGSAHEGCLPPFPADVFMIPQYGYLTLNDGSQAVGRSSFYCLEYFPSQMLRTGNNFQFSYEFENVPFHSSYAHSQSLDRLMNPLIDQYLYYLSKTISGSGQNQQTLKFSVAGPSNMAVQGRNYIPGPSYRQQRVSTTVTQNNSSEFAWPGASSWALNGRNSLMNPGPAMASHKEGEDRFFPLSGSLIFGKQGTGRDNVDADKVMITNEEEIKTTNPVATESYGQVATNHQSAQAQAQTGWVQNQGILSGMVWQDRDVYLQGPIWAKIPHTDGNFHPSPLMGGFGMKHPPPQILIKNTPVPADPPTAFNKDKLNSFITQYSTGQVSVEIEWELQKENSKRWNPEIQYTSNYYKSNNVEFAVNTEGVYSEPRPIGTRYLTRNL

SEQ ID NO: 718 - DNA, 2208 bp, Artificial Sequence
  Description of Artificial Sequence: Synthetic polynucleotide
atggctgccgatggttatcttccagattggctcgaggacaaccttagtgaaggaattcgcgagtggtgggctttgaaacctggagcccctcaacccaaggcaaatcaacaacatcaagacaacgctcgaggtcttgtgcttccgggttacaaataccttggacccggcaacggactcgacaagggggagccggtcaacgcagcagacgcggcggccctcgagcacgacaaggcctacgaccagcagctcaaggccggagacaacccgtacctcaagtgcaaccacgccgacgccgagttccaggagcggctcaaagaagatacgtcttttgggggcaacctcgggcgagcagtcttccaggccaaaaagaggcttcttgaacctcttggtctggttgaggaagcggctaagacggctcctggaaagaagaggcctgtagagcagtctcctcaggaaccggactcctccgcgggtattggcaaatcgggtgcacagcccgctaaaaagagactcaatttcggtcagactggcgacacagagtcagtcccagaccctcaaccaatcggagaacctcccgcagccccctcaggtgtgggatctcttacaatggcttcaggtggtggcgcaccagtggcagacaataacgaaggtgccgatggagtgggtagttcctcgggaaattggcattgcgattcccaatggctgggggacagagtcatcaccaccagcacccgaacctgggccctgcccacctacaacaatcacctctacaagcaaatctccaacagcacatctggaggatcttcaaatgacaacgcctacctcggctacagcaccccctgggggtattttgacttcaacagattccactgccacttctcaccacgtgactggcagcgactcatcaacaacaactggggattccggcctaagcgactcaacttcaagctcttcaacattcaggtcaaagaggttacggacaacaatggagtcaagaccatcgccaataaccttaccagcacggtccaggtcttcacggactcagactatcagctcccgtacgtgctcgggtcggctcacgagggctgcctcccgccgttcccagcggacgttttcatgattcctcagtacgggtatctgacgcttaatgatggaagccaggccgtgggtcgttcgtccttttactgcctggaatatttcccgtcgcaaatgctaagaacgggtaacaacttccagttcagctacgagtttgagaacgtacctttccatagcagctacgctcacagccaaagcctggaccgactaatgaatccactcatcgaccaatacttgtactatctctcaaagactattaacggttctggacagaatcaacaaacgctaaaattcagtgtggccggacccagcaacatggctgtccagggaagaaactacatacctggacccagctaccgacaacaacgtgtctcaaccactgtgactcaaaacaacaacagcgaatttgcttggcctggagcttcttcttgggctctcaatggacgtaatagcttgatgaatcctggacctgctatggccagccacaaagaaggagaggaccgtttctttcctttgtctggatctttaatttttggcaaacaaggaactggaagagacaacgtggatgcggacaaagtcatgataaccaacgaagaagaaattaaaactactaacccggtagcaacggagtcctatggacaagtggccacaaaccaccagagtgcccaagcacaggcgcagaccggctgggttcaaaaccaaggaatacttccgggtatggtttggcaggacagagatgtgtacctgcaaggacccatttgggccaaaattcctcacacggacggcaactttcacccttctccgctgatgggagggtttggaatgaagcacccgcctcctcagatcctcatcaaaaacacacctgtacctgcggatcctccaacggccttcaacaaggacaagctgaactctttcatcacccagtattctactggccaagtcagcgtggagatcgagtgggagctgcagaaggaaaacagcaagcgctggaacccggagatccagtacacttccaactattacaagtctaataatgttgaatttgctgttaatactgaaggtgtatatagtgaaccccgccccattggcaccagatacctgactcgtaatctg

SEQ ID NO: 719 - protein, 736 aa, Artificial Sequence
  Description of Artificial Sequence: Synthetic polypeptide
MAADGYLPDWLEDNLSEGIREWWALKPGAPQPKANQQHQDNARGLVLPGYKYLGPGNGLDKGEPVNAADAAALEHDKAYDQQLKAGDNPYLKCNHADAEFQERLKEDTSFGGNLGRAVFQAKKRLLEPLGLVEEAAKTAPGKKRPVEQSPQEPDSSAGIGKSGAQPAKKRLNFGQTGDTESVPDPQPIGEPPAAPSGVGSLTMASGGGAPVADNNEGADGVGSSSGNWHCDSQWLGDRVITTSTRTWALPTYNNHLYKQISNSTSGGSSNDNAYLGYSTPWGYFDFNRFHCHFSPRDWQRLINNNWGFRPKRLNFKLFNIQVKEVTDNNGVKTIANNLTSTVQVFTDSDYQLPYVLGSAHEGCLPPFPADVFMIPQYGYLTLNDGSQAVGRSSFYCLEYFPSQMLRTGNNFQFSYEFENVPFHSSYAHSQSLDRLMNPLIDQYLYYLSKTINGSGQNQQTLKFSVAGPSNMAVQGRNYIPGPSYRQQRVSTTVTQNNNSEFAWPGASSWALNGRNSLMNPGPAMASHKEGEDRFFPLSGSLIFGKQGTGRDNVDADKVMITNEEEIKTTNPVATESYGQVATNHQSAQAQAQTGWVQNQGILPGMVWQDRDVYLQGPIWAKIPHTDGNFHPSPLMGGFGMKHPPPQILIKNTPVPADPPTAFNKDKLNSFITQYSTGQVSVEIEWELQKENSKRWNPEIQYTSNYYKSNNVEFAVNTEGVYSEPRPIGTRYLTRNL

SEQ ID NO: 720 - DNA, 2208 bp, Artificial Sequence
  Description of Artificial Sequence: Synthetic polynucleotide
atggctgccgatggttatcttccagattggctcgaggacaaccttagtgaaggaattcgcgagtggtgggctttgaaacctggagcccctcaacccaaggcaaatcaacaacatcaagacaacgctcgaggtcttgtgcttccgggttacaaataccttggacccggcaacggactcgacaagggggagccggtcaacgcagcagacgcggcggccctcgagcacgacaaggcctacgaccagcagctcaaggccggagacaacccgtacctcaagtgcaaccacgccgacgccgagttccaggagcggctcaaagaagatacgtcttttgggggcaacctcgggcgagcagtcttccaggccaaaaagaggcttcttgaacctcttggtctggttgaggaagcggctaagacggctcctggaaagaagaggcctgtagagcagtctcctcaggaaccggactcctccgcgggtattggcaaatcgggtgcacagcccgctaaaaagagactcaatttcggtcagactggcgacacagagtcagtcccagaccctcaaccaatcggagaacctcccgcagccccctcaggtgtgggatctcttacaatggcttcaggtggtggcgcaccagtggcagacaataacgaaggtgccgatggagtgggtagttcctcgggaaattggcattgcgattcccaatggctgggggacagagtcatcaccaccagcacccgaacctgggccctgcccacctacaacaatcacctctacaagcaaatctccaacagcacatctggaggatcttcaaatgacaacgcctacctcgactacagcaccccctgggggtattttgacttcaacagattccactgccacttctcaccacgtgactggcagcggctcatcaacaacaactggggattccggcctaagcgactcaacttcaagctcttcaacattcaggtcaaagaggttacggacaacaatggagtcaagaccatcgccaataaccttaccagcacggtccaggtcttcacggactcagactatcagctcccgtacgtgctcgggtcggctcacgagggctgcctcccgccgttcccagcggacgttttcatgattcctcagtacgggtatctgacgcttaatgatggaagccaggccgtgggtcgttcgtccttttactgcctggaatatttcccgtcgcaaatgctaagaacgggtaacaacttccagttcagctacgagtttgagaacgtacctttccatagcagctacgctcacagccaaagcctggaccgactaatgaatccactcatcgaccaatacttgtactatctctcaaagactattaacggttctggacagaatcaacaaacgctaaaattcagtgtggccggacccagcaacatggctgtccagggaagaaactacatacctggacccagctaccgacaacaacgtgtctcaaccactgtgactcaaaacaacaacagcgaatttgcttggcctggagcttcttcttgggctctcaatggacgtaatagcttgatgaatcctggacctgctatggccagccacaaagaaggagaggaccgtttctttcctttgtctggatctttaatttttggcaaacaaggaactggaagagacaacgtggatgcggacaaagtcatgataaccaacgaagaagaaattaaaactactaacccggtagcaacggagtcctatggacaagtggccacaaaccaccagagtgcccaagcacaggcgcagaccggctgggttcaaaaccaaggaatacttccgggtatggtttggcagggcagagatgtgtacctgcaaggacccatttgggccaaaattcctcacacggacggcaactttcacccttctccgctgatgggagggtttggaatgaagcacccgcctcctcagatcctcatcaaaaacacacctgtacctgcggatcctccaacggccttcaacaaggacaagctgaactctttcatcacccagtattctactggccaagtcagcgtggagatcgagtgggagctgcagaaggaaaacagcaagcgctggaacccggagatccagtacacttccaactattacaagtctaataatgttgaatttgctgttaatactgaaggtgtatatagtgaaccccgccccattggcaccagatacctgactcgtaatctg

SEQ ID NO: 721 - protein, 736 aa, Artificial Sequence
  Description of Artificial Sequence: Synthetic polypeptide
MAADGYLPDWLEDNLSEGIREWWALKPGAPQPKANQQHQDNARGLVLPGYKYLGPGNGLDKGEPVNAADAAALEHDKAYDQQLKAGDNPYLKCNHADAEFQERLKEDTSFGGNLGRAVFQAKKRLLEPLGLVEEAAKTAPGKKRPVEQSPQEPDSSAGIGKSGAQPAKKRLNFGQTGDTESVPDPQPIGEPPAAPSGVGSLTMASGGGAPVADNNEGADGVGSSSGNWHCDSQWLGDRVITTSTRTWALPTYNNHLYKQISNSTSGGSSNDNAYLDYSTPWGYFDFNRFHCHFSPRDWQRLINNNWGFRPKRLNFKLFNIQVKEVTDNNGVKTIANNLTSTVQVFTDSDYQLPYVLGSAHEGCLPPFPADVFMIPQYGYLTLNDGSQAVGRSSFYCLEYFPSQMLRTGNNFQFSYEFENVPFHSSYAHSQSLDRLMNPLIDQYLYYLSKTINGSGQNQQTLKFSVAGPSNMAVQGRNYIPGPSYRQQRVSTTVTQNNNSEFAWPGASSWALNGRNSLMNPGPAMASHKEGEDRFFPLSGSLIFGKQGTGRDNVDADKVMITNEEEIKTTNPVATESYGQVATNHQSAQAQAQTGWVQNQGILPGMVWQGRDVYLQGPIWAKIPHTDGNFHPSPLMGGFGMKHPPPQILIKNTPVPADPPTAFNKDKLNSFITQYSTGQVSVEIEWELQKENSKRWNPEIQYTSNYYKSNNVEFAVNTEGVYSEPRPIGTRYLTRNL

SEQ ID NO: 722 - DNA, 2208 bp, Artificial Sequence
  Description of Artificial Sequence: Synthetic polynucleotide
atggctgccgatggttatcttccagattggctcgaggacaacctctctgagggcattcgcgagtggtgggacttgaaacctggagctccgaagcccaaagccaaccagcaaaagcaggacgacggccggggtctggtgcttcctggctacaagtacctcggacccttcaacggactcgacaagggggagcccgtcaacgcggcggacgcagcggccctcgagcacgacaaggcctacgaccagcagctcaaagcgggtgacaatccgtacctgcggtataaccacgccgacgccgagtttcaggagcgtctgcaagaagatacgtcttttgggggcaacctcgggcgagcagtcttccaggccaagaagcgggttctcgaacctctcggtctggttgaggaaggcgctaagacggctcctggaaagaaacgtccggtagagcagtcgccacaagagccagactcctcctcgggcatcggcaagacaggccagcagcccgctaaaaagagactcaattttggtcagactggcgactcagagtcagtccccgatccacaacctctcggagaacctccagcaacccccgctgctgtgggacctactacaatggcttcaggcggtggcgcaccaatggcagacaataacgaaggcgccgacggagtgggtaatgcctcaggaaattggcattgcgattccacatggctgggcgacagagtcatcaccaccagcacccgcacctgggccttgcccacctacaataaccacctctacaagcaaatctccagtgcttcaacgggggccagcaacgacaaccactacttcggctacagcaccccctgggggtattttgatttcaacagattccactgccacttttcaccacgtgactggcagcgactcatcaacaacaattggggattccggcccaagagactcaacttcaaactcttcaacatccaagtcaaggaggtcacgacgaatgatggcgtcacaaccatcgctaataaccttaccagcacggttcaagtcttctcggactcggagtaccagcttccgtacgtcctcggctctgcgcaccagggctgcctccctccgttcccggcggacgtgttcatgattccgcaatacggctacctgacgctcaacaatggcagccaagccgtgggacgttcatccttttactgcctggaatatttcccttctcagatgctgagaacgggcaacaactttaccttcagctacacctttgaggaagcgcctttccacagcagctacgcgcacagccagagcctggaccggctgatgaatcctctcatcgaccaatacctgtattacctgaacagaactcaaaatcagtccggaagtgcccaaaacaaggacttgctgtttagccgtgggtctccagctggcatgtctgttcagcccaaaaactggctacctggaccctgttatcggcagcagcgcgtttctaaaacaaaaacagacaacaacaacagcaattttacctggactggtgcttcaaaatataacctcaatgggcgtgaatccatcatcaaccctggcactgctatggcctcacacaaagacgacgaagacaagttctttcccatgagcggtgtcatgatttttggaaaagagagcgccggagcttcaaacactgcattggacaatgtcatgattacagacgaagaggaaattaaagccactaaccctgtggccaccgaaagatttgggaccgtggcagtcaatttccagagcagcagcacagaccctgcgaccggagatgtgcatgctatgggagcattacctggcatggtgtggcaagatagagacgtgtacctgcagggtcccatttgggccaaaattcctcacacagatggacactttcacccgtctcctcttatgggcggctttggactcaagaacccgcctcctcagatcctcatcaaaaacacgcctgttcctgcgaatcctccggcggagttttcagctacaaagtttgcttcattcatcacccaatactccacaggacaagtgagtgtggaaattgaatgggagctgcagaaagaaaacagcaagcgctggaatcccgaagtgcagtacacatccaattatgcgaaatctgccaacgttgattttactgtggacaacaatggactttatactgagcctcgccccgttggcacccgttaccttacccgtcccctg

SEQ ID NO: 723 - protein, 736 aa, Artificial Sequence
  Description of Artificial Sequence: Synthetic polypeptide
MAADGYLPDWLEDNLSEGIREWWDLKPGAPKPKANQQKQDDGRGLVLPGYKYLGPFNGLDKGEPVNAADAAALEHDKAYDQQLKAGDNPYLRYNHADAEFQERLQEDTSFGGNLGRAVFQAKKRVLEPLGLVEEGAKTAPGKKRPVEQSPQEPDSSSGIGKTGQQPAKKRLNFGQTGDSESVPDPQPLGEPPATPAAVGPTTMASGGGAPMADNNEGADGVGNASGNWHCDSTWLGDRVITTSTRTWALPTYNNHLYKQISSASTGASNDNHYFGYSTPWGYFDFNRFHCHFSPRDWQRLINNNWGFRPKRLNFKLFNIQVKEVTTNDGVTTIANNLTSTVQVFSDSEYQLPYVLGSAHQGCLPPFPADVFMIPQYGYLTLNNGSQAVGRSSFYCLEYFPSQMLRTGNNFTFSYTFEEAPFHSSYAHSQSLDRLMNPLIDQYLYYLNRTQNQSGSAQNKDLLFSRGSPAGMSVQPKNWLPGPCYRQQRVSKTKTDNNNSNFTWTGASKYNLNGRESIINPGTAMASHKDDEDKFFPMSGVMIFGKESAGASNTALDNVMITDEEEIKATNPVATERFGTVAVNFQSSSTDPATGDVHAMGALPGMVWQDRDVYLQGPIWAKIPHTDGHFHPSPLMGGFGLKNPPPQILIKNTPVPANPPAEFSATKFASFITQYSTGQVSVEIEWELQKENSKRWNPEVQYTSNYAKSANVDFTVDNNGLYTEPRPVGTRYLTRPL

SEQ ID NO: 724 - protein, 736 aa, Artificial Sequence
  Description of Artificial Sequence: Synthetic polypeptide
MAADGYLPDWLEDNLSEGIREWWALKPGAPQPKANQQHQDNARGLVLPDYKYLGPGNGLDKGEPVNAADVAALEHDKAYDQQLKAGDNPYLKYNHADAEFQERLKEDTSFGGNLGRAVFQAKKRLLEPLGLVEEAAKTAPGKKRPVEQSPQEPDSSAGIGKSGAQPAKKRLNFGQTGDTESVPDPQPIGEPPAAPSGVGSLTMASGGGAPVADNNEGADGVGSSSGNWHCDSQWLGDGVITTSTRTWALPTYNNHLYKQISNSTSGGSSNDNAYFGYSTPWGYFDFNRFHCHFSPRDWQRLINNNWGFRPKRLNFKLFNIQVKEVTDNNGVKTIANNLTSTVQVFTDSDYQLPYVLGSAHEGCLPPFPADVFMIPQYGYLTLNDGSQAVGRSSFYCLEYFPSQMLRTGNNFQFSYEFENVPFHSSYAHSQSLDRLMNPLIDQYLHYLPKTINGSGQNQQTLKFSVAGPSNMAVQGRNYIPGPSYRQQRVSTTVTQNNNSEFAWPGASSWALNGRNSLMNPGPAMASYKEGEDSFFPLSGSLIFGKQGTGRDNVDADKVMITNEEEIKTTNPVATESYGQVATNHQSAQAQAQTGWVQNQGILPGMVWQDRDVYLQGPIWAKIPHTDGNFHPSPLMGGFGMKHPPPQTLIKNTPVPADPPTAFNKDKLNSFITQYSTGQVSVEIEWELQKENSKRWNPEIQYTSNYYKSNNVEFAVNTEGVYSEPRPIGTRYLTRNL

SEQ ID NO: 725 - protein, 736 aa, Artificial Sequence
  Description of Artificial Sequence: Synthetic polypeptide
MAADGYLPDWLEDNLSEGIREWWALKPGAPQPKANQQHQDNARGLVLPGYKYLGPGNGLDKGEPVNAADAAALEHDKAYDQQLKAGDNPYLKYNHADAEFQERLKEDTSFGGNLGRAVFQAKKRLLEPLGLVEEAAKTAPGKKRPVEQSPQEPDSSAGIGKSGAQPAKKRLNFGQTGDTESVPDPQPIGEPPAAPSGVGSLTMASGGGAPVADNNEGADGVGSSSGNWHCDSQWLGDRVITTSTRTWALPTYNNHLYKQISNSTSGGSSNDNAYFGYSTPWGYFDFNRFHCHFSPRDWQRLINNNWGFRPKRLNFKLFNIQVKEVTDNNGVKTIANNLTSTVQVFTDSDYQLPYVLGSAHEGCLPPFPADVFMIPQYGYLTLNDGSQAVGRSSFYCLEYFPSQMLRTGNNFQFSYEFENVPFHSSYAHSQSLDRLMNPLIDQYLHYLSKTINGSGQNQQTLKFSVAGPSNMAVQGRNYIPGPSYRQQRVSTTVTQNNNSEFAWPGASSWALNGRNSLMNPGPAMASYKEGEDSFFPLSGSLIFGKQGTGRDNVDADKVMITNEEEIKTTNPVATESYGQVATNHQSAQAQAQTGWVQNQGILPGMVWQDRDVYLQGPIWAKIPHTDGNFHPSPLMGGFGMKHPPPQTLIKNTPVPADPPTAFNKDKLNSFITQYSTGQVSVEIEWELQKENSKRWNPEIQYTSNYYKSNNVEFAVNTEGVYSEPRPIGTRYLTRNL

SEQ ID NO: 726 - protein, 736 aa, Artificial Sequence
  Description of Artificial Sequence: Synthetic polypeptide
MAADGYLPDWLEDNLSEGIREWWALKPGAPQPKANQQHQDNARGLVLPGYKYLGPGNGLDKGEPVNAADAAALEHDKAYDQQLKAGDNPYLKYNHADAEFQERLKEDTSFGGNLGRAVFQAKRRLLEPLGLVEEAAKTAPGKKRPVEQSPQEPDSSAGIGKSGAQPAKKRLNFGQTGDTESVPDPQPIGEPPAAPSGVGSLTMASGGGAPVADNNEGADGVGSSSGNWHCDSQWLGDRVITTSTRTWALPTYNNHLYKQISNSTSGGSSNDNAYFGYSTPWGYFDFNRFHCHFSPRDWQRLINNNWGFRPKRLNFKLFNIQIKEVTDNNGVKTIANNLTSTVQVFTDLDYQLPYVLGSAHEGCLPPFPADVFMIPQYGYLTLNDGSQAVGRSSFYCLEYFPSQMLRTGNNFQFSYEFENVPFHSSYAHSQSLDRLMNPLIDQYLHYLSKTINGSGQNQQTLKFSVAGPSNMAVQGRNYIPGPSYRQQRVSTTVTQNNNSEFAWPGASSWALNGRNSLMNPGPAMASYKEGEDSFFPLSGSLIFGKQGTGRDNVDADKVMITNEEEIKTTNPVATESYGQVATNHQSAQAQAQTGWVQNQGILPGMVWQDRDVYLQGPIWAKIPHTDGNFHPSPLMGGFGMKHPPPQTLIKNTPVPADPPTAFNKDKLNSFITQYSTGQVSVEIEWELQKENSKRWNPEIQYTSNYYKSNNVEFAVNTEGVYSEPRPIGTRYLTRNL

SEQ ID NO: 727 - DNA, 2208 bp, Artificial Sequence
  Description of Artificial Sequence: Synthetic polynucleotide
atggctgccgatggttatcttccagattggctcgaggacaacctctctgagggcattcgcgagtggtgggacttgaaacctggagccccgaagcccaaagccaaccagcaaaagcaggacgacggccggggtctggtgcttcctggctacaagtacctcggacccttcaacggactcgacaagggggagcccgtcaacgcggcggacgcagcggccctcgagcacgacaaggcctacgaccagcagctcaaagcgggtgacaatccatacctgcggtataaccacgccgacgccgagtttcaggagcgtctgcaagaaaatacgtcttttgggggcaacctcgggcgagcagtcttccaggccaagaagcgggttctcgaacctctcggtctggttgaggaaggcgctaagacggctcctggaaagaaacgtccggtagagcagtcgccacaagagccagactcctcctcgggcatcggcaagacaggccagcagcccgctaaaaagagactcaattttggtcagactggcgactcagagtcagtccccgatccacaacctctcggagaacctccagcaacccccgctgctgtgggacctactacaatggcttcaggcggtggcgcaccaatggcagacaataacgaaggcgccgacggagtgggtaatgcctcaggaaattggcattgcgattccacatggctgggcgacagagtcatcaccaccagcacccgcacctgggccttgcccacctacaataaccacctctacaagcaaatctccagtgcttcaacgggggccagcaacgacaaccactacttcggctacagcaccccctgggggtattttgatttcaacagattccactgccactttccaccacgtgactggcagcgactcatcaacaacaattggggattccggcccaagagactcaacttcaaactcttcaacatccaagtcaaggaggtcacgtcgaatgatggcgtcacaaccatcgctaataaccttaccagcacggttcaagtcttctcggactcggagtaccagcttccgtacgtcctcggctctgcgcaccagggctgcctccctccgttcccggcggacgtgttcatgattccgcaatacggctacctgacgctcaacaatggcagccaagccgtgggacgttcatccttttactgcctggaatatttcccttctcagatgctgagaacgggcaacaactttaccttcagctacacctttgaggaagtgcctttccacagcagctacgcgcacagccagagcctggaccggctgatgaatcctctcatcgaccaatacctgtattacctgaacagaactcaaaatcagtccggaagtgcccaaaacaaggacttgctgtttagccgtgggtctccagctggcatgtctgttcagcccaaaaactggctacctggtccctgttatcggcagcagcgcgtttctaaaacaaaaacagacaacaacaacagcaattttacctggactggtgcttcaaaatataacctcaatgggcgtgaatccatcatcaaccctggcactgctatggcctcacacaaagacgacgaagacaagttctttcccatgagcggtgtcatgatttttggaaaagagagcgccggagcttcaaacactgcattggacaatgtcatgattacagacgaagaggaaattaaagccactaaccctgtggccaccgaaagatttgggaccgtggcagtcaatttccagagcagcagcacagaccctgcgaccggagatgtgcatgctatgggagcattacctggcatggtgtggcaagatagagacgtgtacctgcagggtcccatttgggccaaaattcctcacacagatggacactttcacccgtctcctcttatgggcggctttggactcaagaacccgcctcctcagatcctcatcaaaaacacgcctgttcctgcgaatcctccggcggagttttcagctacaaagtttgcttcattcatcacccaatactccacaggacaagtgagtgtggaaattgaatgggagctgcagaaagaaaacagcaagcgctggaatcccgaagtgcagtacacatccaattatgcaaaatctgccaacgttgattttactgtggacaacaatggactttatactgagcctcgccccattggcacccgttaccttacccgtcccctg

SEQ ID NO: 728 - protein, 736 aa, Artificial Sequence
  Description of Artificial Sequence: Synthetic polypeptide
MAADGYLPDWLEDNLSEGIREWWDLKPGAPKPKANQQKQDDGRGLVLPGYKYLGPFNGLDKGEPVNAADAAALEHDKAYDQQLKAGDNPYLRYNHADAEFQERLQENTSFGGNLGRAVFQAKKRVLEPLGLVEEGAKTAPGKKRPVEQSPQEPDSSSGIGKTGQQPAKKRLNFGQTGDSESVPDPQPLGEPPATPAAVGPTTMASGGGAPMADNNEGADGVGNASGNWHCDSTWLGDRVITTSTRTWALPTYNNHLYKQISSASTGASNDNHYFGYSTPWGYFDFNRFHCHFPPRDWQRLINNNWGFRPKRLNFKLFNIQVKEVTSNDGVTTIANNLTSTVQVFSDSEYQLPYVLGSAHQGCLPPFPADVFMIPQYGYLTLNNGSQAVGRSSFYCLEYFPSQMLRTGNNFTFSYTFEEVPFHSSYAHSQSLDRLMNPLIDQYLYYLNRTQNQSGSAQNKDLLFSRGSPAGMSVQPKNWLPGPCYRQQRVSKTKTDNNNSNFTWTGASKYNLNGRESIINPGTAMASHKDDEDKFFPMSGVMIFGKESAGASNTALDNVMITDEEEIKATNPVATERFGTVAVNFQSSSTDPATGDVHAMGALPGMVWQDRDVYLQGPIWAKIPHTDGHFHPSPLMGGFGLKNPPPQILIKNTPVPANPPAEFSATKFASFITQYSTGQVSVEIEWELQKENSKRWNPEVQYTSNYAKSANVDFTVDNNGLYTEPRPIGTRYLTRPL

SEQ ID NO: 729 - protein, 736 aa, Artificial Sequence
  Description of Artificial Sequence: Synthetic polypeptide
MAADGYLPDWLEDNLSEGIREWWALKPGAPQPKANQQHQDNARGLVLPGYKYLGPGNGLDKGEPVSAADAAALEHDKAYDQQLKAGDNPYLKYNHADAEFQERLKEDTSFGGNLGRAVFQAKKRLLEPLGLVEEAAKTAPGKKRPVEQSPQEPDSSAGIGKSGAQPAKKRLNFGQTGDTESVSDPQPIGEPPAAPSGVGSLTMASGGGAPVADNNEGADGVGSSSGNWHCDSQWLGDRVITTSTRTWALPTYNNHLYKQISNSTSGGSSNDNAYFGYSTPWGYFDFNRFHCHFSPRDWQRLINNNWGFRPKRLNFKLFNIQVKEVTDNNGVKTIANNLTSTVQVFTDSDYQLPYVLGSAHEGCLPPSPADVFMIPQYGYLTLNDGSQAVGRSSFYCLEYFPSQMLRTGNNFQFSYEFENVPFHSSYAHSQSLDRLMNPLIDQYLHYLSKTINGSGQNQQTLKFSVAGPSNMAVQGRNYIPGPSYRQQRVSTTVTQNNNSEFAWPGASSWALNGRNSLMNPGPAMASYKEGEDSFFPLSGSLIFGKQGTGRDDVDADKVIITNEEEIKTTNPVATESYGQVATNHQSAQAQAQTGWVQNQGILPGMVWQDRDVYLQGPIWAKIPHTDGNFHPSPLMGGFGMKHPPPQTLIKNTPVPADPPTAFNKDKLNSFITQYSTGQVSVEIEWELQKENSKRWNPEIQYTSNYYKSNNVEFAVNTEGVYSEPRPIGTRYLTRNL

SEQ ID NO: 730 - DNA, 2208 bp, Artificial Sequence
  Description of Artificial Sequence: Synthetic polynucleotide
atggctgccgatggttatcttccagattggctcgaggacaacctctctgagggcattcgcgagtggtgggacttgaaacctggagccccgaagcccaaagccaaccagcaaaagcaggacgacggccggggtctggtgcttcctggctacaagtacctcggacccttcaacggactcgacaagggggagcccgtcaacgcggcggacgcagcggccctcgagcacgacaaggcctacgaccagcagctcaaagcgggtgacaatccgtacctgcggtataaccacgccgacgccgagtttcaggagcgtctgcaagaagatacgtcttttgggggcaacctcgggcgagcagtcttccaggccaagaagcgggttctcgaacctctcggtctggttgaggaaggcgctaagacggctcctggaaagaaacgtccggtagagcagtcgccacaagagccagactcctcctcgggcatcggcaagacaggccagcagcccgctaaaaagagactcaattttggtcagactggcgactcagagtcagtccccgatccacaacctctcggagaacctccagcaacccccgctgctgtgggacctactacaatggcttcaggcggtggcgcaccaatggcagacaataacgaaggcgccgacggagtgggtaatgcctcaggaaattggcattgcgattccacatggctgggcgacagagtcatcaccaccagcacccgcacctgggccttgcccacctacaataaccacctctacaagcaaatctccagtgcttcaacgggggccagcaacgacaaccactacttcggctacagcaccccctgggggtattttgatttcaacagattccactgccacttttcaccacgtgactggcagcgactcatcaacaacaattggggattccggcccaagagactcaacttcaaactcttcaacatccaagtcaaggaggtcacgacgaatgatggcgtcacaaccatcgctaataaccttaccagcacggttcaagtcttctcggactcggagtaccagcttccgtacgtcctcggctctgcgcaccagggctgcctccctccgttcccggcggacgtgttcatgattccgcaatacggctacctgacgctcaacaatggcagccaagccgtgggacgttcatccttttactgcctggaatatttcccttctcagatgctgagaacgggcaacaactttaccttcagctacacctttgaggaagtgcctttccacagcagctacgcgcacagccagagcctggaccggctgatgaatcctctcatcgaccaatacctgtattacctgaacagaactcaaaatcagtccggaagtgcccaaaacaaggacttgctgtttagccgtgggtctccagctggcacgtctgttcagcccaaaaactggctacctggaccctgttatcggcagcagcgcgtttctaaaacaaaaacagacaacaacaacagcaattttacctggactggtgcttcaaaatataacctcaatgggcgtgaatccatcatcaaccctggcactgctatggcctcacacaaagacgacgaagacaagttctttcccatgagcggtgtcatgatttttggaaaagagagcgccggagcttcaaacactgcattggacaatgtcatgattacagacgaagaggaaattaaagccactaaccctgtggccaccgaaagatttgggaccgtggcagtcaatttccagagcagcagcacagaccctgcgaccggagatgtgcatgctatgggagcattacctggcatggtgtggcaagatagagacgtgtacctgcagggtcccatttgggccaaaattcctcacacagatggacactttcacccgtctcctcttatgggcggctttggactcaagaacccgcctcctcagatcctcatcaaaaacacgcctgttcctgcgaatcctccggcggagttttcagctacaaagtttgcttcattcatcacccaatactccacaggacaagtgagtgtggaaattgaatgggagctgcagaaagaaaacagcaagcgctggaatcccgaagtgcagtacacatccaattatgcaaaatctgccaacgttgattttactgtggacaacaatggactttatactgggcctcgccccattggcacccgttaccttacccgtcccctg

SEQ ID NO: 731 - protein, 736 aa, Artificial Sequence
  Description of Artificial Sequence: Synthetic polypeptide
MAADGYLPDWLEDNLSEGIREWWDLKPGAPKPKANQQKQDDGRGLVLPGYKYLGPFNGLDKGEPVNAADAAALEHDKAYDQQLKAGDNPYLRYNHADAEFQERLQEDTSFGGNLGRAVFQAKKRVLEPLGLVEEGAKTAPGKKRPVEQSPQEPDSSSGIGKTGQQPAKKRLNFGQTGDSESVPDPQPLGEPPATPAAVGPTTMASGGGAPMADNNEGADGVGNASGNWHCDSTWLGDRVITTSTRTWALPTYNNHLYKQISSASTGASNDNHYFGYSTPWGYFDFNRFHCHFSPRDWQRLINNNWGFRPKRLNFKLFNIQVKEVTTNDGVTTIANNLTSTVQVFSDSEYQLPYVLGSAHQGCLPPFPADVFMIPQYGYLTLNNGSQAVGRSSFYCLEYFPSQMLRTGNNFTFSYTFEEVPFHSSYAHSQSLDRLMNPLIDQYLYYLNRTQNQSGSAQNKDLLFSRGSPAGTSVQPKNWLPGPCYRQQRVSKTKTDNNNSNFTWTGASKYNLNGRESIINPGTAMASHKDDEDKFFPMSGVMIFGKESAGASNTALDNVMITDEEEIKATNPVATERFGTVAVNFQSSSTDPATGDVHAMGALPGMVWQDRDVYLQGPIWAKIPHTDGHFHPSPLMGGFGLKNPPPQILIKNTPVPANPPAEFSATKFASFITQYSTGQVSVEIEWELQKENSKRWNPEVQYTSNYAKSANVDFTVDNNGLYTGPRPIGTRYLTRPL

SEQ ID NO: 732 - protein, 736 aa, Artificial Sequence
  Description of Artificial Sequence: Synthetic polypeptide
MAADGYLPDWLEDNLSEGIREWWALKPGAPQPKANQQHQDNARGLVLPGYKYLGPGNGLDKGEPVNAADAAALEHDKAYDQQLKAGDNPYLKYNHAGAEFQERLKEDTSFGGNLGRAVFQAKKRLLEPLGLVEEAAKTAPGKKRPVEQSPQEPDSSAGIGKSGAQPAKKRLNFGQTGDTESVPDPQPIGEPPAAPSGVGSLTMASGGGAPVADNNEGAGGVGSSSGNWHCDSQWLGDRVVTTSTRTWALPTYNNHLYKQISNSTSGGSSNDNAYFGYSTPWGYFDFNRFHCHFSPRDWQRLINNNWGFRPKRLNFKLFNIQVKEVTDNNGVKTIANNLTSTVQVFTDSDYQLPYVLGSAHGGCLPPFPADVFMIPQYGYLTLNDGSQAVGRSSFYCLEYFPSQMLRTGNNFQFSYEFENVPFHSSYAHSQSLDRLMNPLIDQYLHYLSKTINGSGQNQQTLKFSVAGPSNMAVQGRSYIPGPSYRQQRVSTTVTQNNNSEFAWPGASSWALNGRNSLMNPGPAMASYKEGEDSFFPLSGSLIFGKQGTGRDNVDADKVMITNEEEIKTTNPVATESYGQVATNHQSAQAQAQTGWVQNQGILPGMVWQDRDVYLQGPIWAKIPHTDGNFHPSPLMGGFGMKHPPPQTLIKNTPVPADPPTAFNKDKLNSFITQYSTGQVSVEIEWELQKENSKRWNPEIQYTSNYYKSNNVEFAVNTEGVYSEPRPIGTRYLTRNL

SEQ ID NO: 733 - protein, 736 aa, Artificial Sequence
  Description of Artificial Sequence: Synthetic polypeptide
MAADGYLPDWLEDNLSEGIREWWALKPGAPQPKANQQHQDNARGLVLPGYKYLGPGNGLDKGEPVNAADAAALEHDKAYDQQLKAGDNPYLKYNHADAEFQERLKEDTSFGGNLGRAVFQAKKRLLEPLGLVEEAAKTAPGKKRPVEQSPQEPDSSAGIGKSGAQPAKKRLNFGQTGDTESVPDPQPIGEPPAAPSGVGSLTMASGGGAPVADNNEGADGVGSSSGNWHCDSQWLGDRVVTTSTRTWALPTYNNHLYKQISNSTSGGSSNDNAYFGYSTPWGYFDFNRFHCHFSPRDWQRLINNNWGFRPKRLNFKLFNIQVKEVTDNNGVKTIANNLTSTVQVFTDSDYQLPYVLGSAHEGCLPPFPADVFMIPQYGYLTLNDGSQAVGRSSFYCLEYFPSQMLRTGNNFQFSYEFENVPFHSSHAHSQSLDRLMNPLIDQYLHYLSKTINGSGQNQQTLKFSVAGHSNMAVQGRNYIPGPSYRQQRVSTTVTQNNNSEFAWPGASSWALNGRNSLMNPGPAMASYKEGEDSFFPLSGSLIFGKQGTGRDNVDADKVMITNEEEIKTTNPVATESYGQVATNHQSAQAQAQTGWVQNQGILPGMVWQDRDVYLQGPIWAKIPHTDGNFHPSPLMGGFGMKHPPPQTLIKNTPVPADPPTAFNKDKLNSFITQYSTGQVSVEIGWELQKENSKRWNPEIQYTSNYYKSNNVEFAVNTEGVYSEPRPIGTRYLTRNL

SEQ ID NO: 734 - protein, 736 aa, Artificial Sequence
  Description of Artificial Sequence: Synthetic polypeptide
MAADGYLPDWLEDNLSEGIREWWALKPGAPQPKANQQHQDNARGLVLPGYKYLGPGNGLDKGEPVNAADAAALEHDKAYDQQLKAGDNPYLKYNHADAEFQERLKEDTSFGGNLGRAVFQAKKRLLEPLGLVEEAAKTAPGKKRPVEQSPQEPDSSAGIGKSGAQPAKKRLNFGQTGDTESVPDPQPIGEPPAAPSGVGSLTMASGGGAPVADNNEGADGVGSSSGNWHCDSQWLGDRVITTSTRTWALPTYNNRLYKQISNSTSGGSSNDNAYFGYSTPWGYFDFNRFHCHFSPRDWQRLINNNWGFRPKRLNFKPFNIQVKEVTDNNGVKTIANNLTSTVQVFTDSDYQLPYVLGSAHEGCLPPFPADVFMIPQYGYLTLNDGSQAVGRSSFYCLEYFPSQMLRTGNNFQFSYEFENVPFHSSYAHSQSLDRLMNPLIDQYLHYLSKTINGSGQNQQTLKFSVAGPSNMAVQGRNYIPGPSYRQQRVSTTVTQNNNSEFAWPGASSWALNGRNSLMNPGPAMASYKEGEDSFFPLSGSLIFGKQGTGRDNVDADKVMITNEEEIKTTNPVATESYGQVATNHQSAQAQAQTGWVQNQGILPGMVWQDRDVYLQGPIWAKIPHTDGNFHPSPLMGGFGMKHPPPQTLIKNTPVPADPPTAFNKDKLNSFITQYSTGQVSVEIEWELQKENSKRWNPEIQYTSNYYKSNNVEFAVNTEGVYSEPRPIGTRYLTRNL

SEQ ID NO: 735 - protein, 736 aa, Artificial Sequence; identical to SEQ ID NO: 725
  Description of Artificial Sequence: Synthetic polypeptide

SEQ ID NO: 736 - DNA, 2208 bp, Artificial Sequence
  Description of Artificial Sequence: Synthetic polynucleotide
atggctgccgatggttatcttccagattggctcgaggacaacctctctgagggcattcgcgagtggtgggacttgaaacctggagccccgaagcccaaagccaaccagcaaaagcaggacgacggccggggtctggtgcttcctggctacaagtacctcggacccttcaacggactcgacaagggggagcccgtcaacgcggcggacgcagcggccctcgagcacgacaaggcctacgaccagcagctcaaagcgggtgacaatccgtacctgcggtataaccacgccgacgccgagtttcaggagcgtctgcaagaagatacgtcttttgggggcaacctcgggcgagcagtcttccaggccaagaagcgggttctcgaacctctcggtctggttgaggaaggcgctaagacggctcctggaaagaaacgtccggtagagcagtcgccacaagagccagactcctcctcgggcatcggcaagacaggccagcagcccgctaaaaagagactcaattttggtcagactggcgactcagagtcagtccccgatccacaacctctcggagaacctccagcaacccccgctgctgtgggacctactacaatggcttcaggcggtggcgcaccaatggcagacaataacgaaggcgccgacggagtgggtaatgccccaggaaattggcattgcgactccacatggctgggcgacagagtcatcaccaccagcacccgcacctgggccttgcccacctacaataaccacctctacaagcaaatctccagtgcttcaacgggggccagcaacgacaaccactacttcggctacagcaccccctgggggtattttgatttcaacagattccactgccacttttcaccacgtgactggcagcgactcatcaacaacaattggggattccggcccaagagactcaacttcaaactcttcaacatccaagtcaaggaggtcacgacgaatgatggcgtcacaaccatcgctaataaccttaccagcacggttcaagtcttctcggactcggagtaccagcttccgtacgtcctcggctctgcgcaccagggctgcctccctccgttcccggcggacgtgttcatgattccgcaatacggctacctgacgctcaacaatggcagccaagccgtgggacgttcatccttttactgcctggaatatttcccttctcagatgctgagaacgggcaacaactttaccttcagctacacctttgaggaagtgcctttccacagcagctacgcgcacagccagagcctggaccggctgatgaatcctctcatcgaccaatacctgtattacctgaacagaactcaaaatcagtccggaagtgcccaaaacaaggacttgctgtttagccgtgggtctccagctggcatgtctgttcagcccaaaaactggctacctggaccctgttatcggcagcagcgcgtttctaaaacaaaaacagacaacaacaacagcaattttacctggactggtgcttcaaaatataacctcaatgggcgtgaatccatcatcaaccctggcacagctatggcctcacacaaagacgacgaagacaagttctttcccatgagcggtgtcatgatttttggaaaagagagcgccggagcttcaaacactgcattggacaatgtcatgattacaggcgaagaggaaattaaagccactaaccctgtggccaccgaaagatttgggaccgtggcagtcaatttccagagcagcagcacagaccctgcgaccggagatgtgcatgctatgggagcattacctggcatggtgtggcaagatagagacgtgtacctgcagggtcccatttgggccaaaattcctcacacagatggacactttcacccgtctcctcttatgggcggctttggactcaagaacccgcctcctcagatcctcatcaaaaacacgcctgttcctgcgaatcctccggcggagttttcagctacaaagtttgcttcattcatcacccaatactccacaggacaagtgagtgtggaaattgaatgggagctgcagaaagaaaacagcaagcgctggaatcccgaagtgcagtacacatccaattatgcaaaatctgccaacgttgattttactgtggacaacaatggactttatactgagcctcgccccattggcacccgttaccttacccgtcccctg

SEQ ID NO: 737 - protein, 736 aa, Artificial Sequence
  Description of Artificial Sequence: Synthetic polypeptide
MAADGYLPDWLEDNLSEGIREWWDLKPGAPKPKANQQKQDDGRGLVLPGYKYLGPFNGLDKGEPVNAADAAALEHDKAYDQQLKAGDNPYLRYNHADAEFQERLQEDTSFGGNLGRAVFQAKKRVLEPLGLVEEGAKTAPGKKRPVEQSPQEPDSSSGIGKTGQQPAKKRLNFGQTGDSESVPDPQPLGEPPATPAAVGPTTMASGGGAPMADNNEGADGVGNAPGNWHCDSTWLGDRVITTSTRTWALPTYNNHLYKQISSASTGASNDNHYFGYSTPWGYFDFNRFHCHFSPRDWQRLINNNWGFRPKRLNFKLFNIQVKEVTTNDGVTTIANNLTSTVQVFSDSEYQLPYVLGSAHQGCLPPFPADVFMIPQYGYLTLNNGSQAVGRSSFYCLEYFPSQMLRTGNNFTFSYTFEEVPFHSSYAHSQSLDRLMNPLIDQYLYYLNRTQNQSGSAQNKDLLFSRGSPAGMSVQPKNWLPGPCYRQQRVSKTKTDNNNSNFTWTGASKYNLNGRESIINPGTAMASHKDDEDKFFPMSGVMIFGKESAGASNTALDNVMITGEEEIKATNPVATERFGTVAVNFQSSSTDPATGDVHAMGALPGMVWQDRDVYLQGPIWAKIPHTDGHFHPSPLMGGFGLKNPPPQILIKNTPVPANPPAEFSATKFASFITQYSTGQVSVEIEWELQKENSKRWNPEVQYTSNYAKSANVDFTVDNNGLYTEPRPIGTRYLTRPL

SEQ ID NO: 738 - DNA, 2208 bp, Artificial Sequence
  Description of Artificial Sequence: Synthetic polynucleotide
atggctgccgatggttatcttccagattggctcgaggacaacctctctgagggcattcgcgagtggtgggacttgaaacctggagccccgaagcccaaagccaaccagcaaaagcaggacgacggccggggtctggtgcttcctggctacaagtacctcggacccttcaacagactcgacaagggggagcccgtcaacgcggcggacgcagcggccctcgagcacgacaaggcctacgaccagcagctcaaagcgggtgacaatccgtacctgcggtataaccacgccgacgccgagtttcaggagcgtctgcaagaagatacgtcttttgggggcaacctcgggcgagcagtcttccaggccaagaagcgggttctcgaacctctcggtctggttgaggaaggcgctaagacggctcctggaaggaaacgtccggtagagcagtcgccacaagagccagactcctcctcgggcatcggcaagacaggccagcagcccgctaaaaagagactcaattttggtcagactggcgactcagagtcagtccccgatccacaacctctcggagaacctccagcaacccccgctgctgtgggacctactacaatggcttcaggcggtggcgcgccaatggcagacaataacgaaggcgccgacggagtgggtaatgcctcaggaaattggcattgcgattccacatggctgggcgacagagtcatcaccaccagcacccgcacctgggccttgcccacctacaataaccacctctacaagcaaatctccagtgcttcaacgggggccagcaacgacaaccactacttcggctacagcaccccctgggggtattttgatttcaacagattccactgccacttttcaccacgtgactggcagcgactcatcaacaacaattggggattccggcccaagagactcaacttcaaactcttcaacatccaagtcaaggaggtcacgacgaatgatggcgtcacaaccatcgctaataaccttaccagcacggttcaagtcttctcggactcggagtaccagcttccgtacgtcctcggctctgcgcaccagggctgcctccctccgttcccggcggacgtgttcatgattccgcaatacggctacctgacgctcaacaatggcggccaagccgtgggacgttcatccttttactgcctggaatatttcccttctcagatgctgagaacgggcaacaactttaccttcagctacacctttgaggaagtgcctttccacagcagctacgcgcacagccagagcctggaccggctgatgaatcctctcatcgaccaatacctgtattacctgaacagaactcaaaatcagtccggaagtgcccaaaacaaggacttgctgtttagccgtgggtctccagctggcatgtctgttcagcccaaaaactggctacctggaccctgttatcggcagcagcgcgtttctaaaacaaaaacagacaacaacaacagcaattttacctggactggtgcttcaaaatatagcctcaatgggcgtgaatccatcatcaaccctggcactgctatggcctcacacaaagacgacgaagacaagttctttcccatgggcggtgtcatgatttttggaaaagagagcgccggagcttcaaacactgcattggacaatgccatgattacagacgaagaggaaattaaagccactaaccctgtggccaccgaaagatttgggaccgtggcagtcaatttccagagcagcagcacagaccctgcgaccggagatgtgcatgctatgggagcattacctggcatggtgtggcaagatagagacgtgtacctgcagggtcccatttgggccaaaattcctcacacagatggacactttcacccgtctcctcttatgggcggctttggactcaagaacccgcctcctcagatcctcatcaaaaacacgcctgttcctgcgaatcctccggcggagttttcagctacaaagtttgcttcattcatcacccaatactccacaggacaagtgagtgtggaaattgaatgggagctgcagaaagaaaacagcaagcgctggaatcccgaagtgcagtacacatccaattatgcaaaatctgccaacgttgattttactgtggacaacaatggactttatactgagcctcgccccattggcacccgttaccttacccgtcccctg

SEQ ID NO: 739 - protein, 736 aa, Artificial Sequence
  Description of Artificial Sequence: Synthetic polypeptide
MAADGYLPDWLEDNLSEGIREWWDLKPGAPKPKANQQKQDDGRGLVLPGYKYLGPFNRLDKGEPVNAADAAALEHDKAYDQQLKAGDNPYLRYNHADAEFQERLQEDTSFGGNLGRAVFQAKKRVLEPLGLVEEGAKTAPGRKRPVEQSPQEPDSSSGIGKTGQQPAKKRLNFGQTGDSESVPDPQPLGEPPATPAAVGPTTMASGGGAPMADNNEGADGVGNASGNWHCDSTWLGDRVITTSTRTWALPTYNNHLYKQISSASTGASNDNHYFGYSTPWGYFDFNRFHCHFSPRDWQRLINNNWGFRPKRLNFKLFNIQVKEVTTNDGVTTIANNLTSTVQVFSDSEYQLPYVLGSAHQGCLPPFPADVFMIPQYGYLTLNNGGQAVGRSSFYCLEYFPSQMLRTGNNFTFSYTFEEVPFHSSYAHSQSLDRLMNPLIDQYLYYLNRTQNQSGSAQNKDLLFSRGSPAGMSVQPKNWLPGPCYRQQRVSKTKTDNNNSNFTWTGASKYSLNGRESIINPGTAMASHKDDEDKFFPMGGVMIFGKESAGASNTALDNAMITDEEEIKATNPVATERFGTVAVNFQSSSTDPATGDVHAMGALPGMVWQDRDVYLQGPIWAKIPHTDGHFHPSPLMGGFGLKNPPPQILIKNTPVPANPPAEFSATKFASFITQYSTGQVSVEIEWELQKENSKRWNPEVQYTSNYAKSANVDFTVDNNGLYTEPRPIGTRYLTRPL

SEQ ID NO: 740 - DNA, 2208 bp, Artificial Sequence
  Description of Artificial Sequence: Synthetic polynucleotide
atggctgccgatggttatcttccagattggctcgaggacaacctctctgagggcattcgcgagtggtgggacttgaaacctggagccccgaagcccaaagccaaccagcaaaagcaggacgacggccggggtctggtgcttcctggctacaagtacctcggacccttcaacggactcgacaagggggagcccgtcaacgcggcggacgcagcggccctcgagcacgacaaggcctacgaccagcagctcaaagcgggtgacaatccgtacctgcggtataaccacgccgacgccgagtttcaggagcgtctgcaagaagatacgtcttttgggggcaacctcgggcgagcagtcttccaggccaagaagcgggttctcgaacctctcggtctggttgaggaaggcgctaagacggctcctggaaagaaacgtccggtagagcagtcgccacaagagccagactcctcctcgggcatcggcaagacaggccagcagcccgctaaaaagagactcaattttggtcagactggcgactcagagtcagtccccgatccacaacctctcggagaacctccagcaacccccgctgctgtgggacctactacaatggcttcaggcggtggcgcaccaatggcagacaataacgaaggcgccgacggagtgggtaatgcctcaggaaattggcattgcgattccacatggctgggcggcagagtcatcaccaccagcacccgcacctgggccttgcccacctacaataaccacctctacaagcaaatctccagtgcttcaacgggggccagcaacgacaaccactacttcggctacagcaccccctgggggtattttgatttcaacagattccactgccacttttcaccacgtgactggcagcgactcatcaacaacaattggggattccggcccaagagactcaacttcaaactcttcaacatccaagtcaaggaggtcacgacgaatgatggcgtcacaaccatcgctaataaccttaccagcacggttcaagtcttctcggactcggagtaccagcttccgtacgtcctcggctctgcgcaccagggctgcctccctccgttcccggcggacgtgttcatgattccgcaatacggctacctgacgctcaacaatggcagccaagccgtgggacgttcatccttttactgcctggaatatttcccttctcagatgctgagaacgggcaacaactctaccttcagctacacctttgaggaagtgcctttccacagcagctacgcgcacagccagagcctggaccggctgatgaatcctctcatcgaccaatacctgtattacctgaacagaactcaaaatcagtccggaagtgcccaaaacaaggacttgctgtttagccgtgggtctccagctggcatgtctgttcagcccaaaaactggctacctggaccctgttatcggcagcagcgcgtttctaaaacaaaaacagacaacaacaacagcaattttacctggactggtgcttcaaaatataacctcaatgggcgtgaatccatcatcaaccctggcactgctatggcctcacacaaagacgacgaagacaagttctttcccatgagcggtgtcatgatttttggaaaagagagcgccggagcttcaaacactgcattggacaatgtcatgattacagacgaagaggaaattaaagccactaaccctgtggccaccgaaagatttgggaccgtggcagtcaatttccagagcagcagcacagaccctgcgaccggagatgtgcatgctatgggaacattacctggcatggtgtggcaagatagagacgtgtacctgcagggtcccatttgggccaaaattcctcacacagatggacactttcacccgtctcctcttatgggcggctttggactcaagaacccgcctcctcagatcctcatcaaaaacacgcctgttcctgcgaatcctccggcggagttttcagctacaaagtttgcttcattcatcacccaatactccacaggacaagtgagtgtggaaattgaatgggagctgcagaaagaaaacagcaagcgctggaatcccgaagtgcagtacacatccaattatgcaaaatctgccaacgttgattttactgtggacaacaatggactttatactgagcctcgccccattggcacccgttaccttacccgtcccctg

SEQ ID NO: 741 - protein, 736 aa, Artificial Sequence
  Description of Artificial Sequence: Synthetic polypeptide
MAADGYLPDWLEDNLSEGIREWWDLKPGAPKPKANQQKQDDGRGLVLPGYKYLGPFNGLDKGEPVNAADAAALEHDKAYDQQLKAGDNPYLRYNHADAEFQERLQEDTSFGGNLGRAVFQAKKRVLEPLGLVEEGAKTAPGKKRPVEQSPQEPDSSSGIGKTGQQPAKKRLNFGQTGDSESVPDPQPLGEPPATPAAVGPTTMASGGGAPMADNNEGADGVGNASGNWHCDSTWLGGRVITTSTRTWALPTYNNHLYKQISSASTGASNDNHYFGYSTPWGYFDFNRFHCHFSPRDWQRLINNNWGFRPKRLNFKLFNIQVKEVTTNDGVTTIANNLTSTVQVFSDSEYQLPYVLGSAHQGCLPPFPADVFMIPQYGYLTLNNGSQAVGRSSFYCLEYFPSQMLRTGNNSTFSYTFEEVPFHSSYAHSQSLDRLMNPLIDQYLYYLNRTQNQSGSAQNKDLLFSRGSPAGMSVQPKNWLPGPCYRQQRVSKTKTDNNNSNFTWTGASKYNLNGRESIINPGTAMASHKDDEDKFFPMSGVMIFGKESAGASNTALDNVMITDEEEIKATNPVATERFGTVAVNFQSSSTDPATGDVHAMGTLPGMVWQDRDVYLQGPIWAKIPHTDGHFHPSPLMGGFGLKNPPPQILIKNTPVPANPPAEFSATKFASFITQYSTGQVSVEIEWELQKENSKRWNPEVQYTSNYAKSANVDFTVDNNGLYTEPRPIGTRYLTRPL

SEQ ID NO: 742 - DNA, 2208 bp, Artificial Sequence
  Description of Artificial Sequence: Synthetic polynucleotide
atggctgccgatggttatctcccagattggctcgaggacaacctctctgagggcattcgcgagtggtgggacttgaaacctggagccccgaagcccaaagccaaccagcaaaagcaggacgacggccggggtctggtgcttcctggctacaagtacctcggacccttcaacggactcgacaagggggagcccgtcagcgcggcggacgcagcggccctcgagcacgacaaggcctacgaccagcagctcaaagcgggtgacaatccgtacctgcggtataaccacgccgacgccgagtttcaggagcgtctgcaagaagatacgtcttttgggggcaacctcgggcgagcagtcttccaggccaagaagcgggttctcgaacctctcggtctggttgaggaaggcgctaagacggctcctggaaagaaacgtccggtagagcagtcgccacaagagccagactcctcctcgggcatcggcaagacaggccagcagcccgctaaagagagactcaattttggtcagactggcgactcagagtcagtccccgatccacaacctctcggagaacctccagcaacccccgctgctgtgggacctactacaatggcttcaggcggtggcgcaccaatggcagacaataacgaaggcgccgacggagtgggtaatgcctcaggaaattggcattgcgattccacatggctgggcgacagagtcatcaccaccagcacccgcacctgggccttgcccacctacaataaccacctctacaagcaaatctccagtgcttcaacgggggccagcaacgacaaccactacttcggctacagcaccccctgggggtattttgatttcaacagattccactgccacttttcaccacgtgactggcagcgactcatcaacaacaattggggattccggcccaagagactcaacttcaaactcttcaacatccaagtcaaggaggtcacgacgaatgatggcgtcacaaccatcgccaataaccttaccagcacggttcaagtcttctcggactcggagtaccagcttccgtacgtcctcggctctgcgcaccagggctgcctccctccgttcccggcggacgtgttcatgattccgcaatacggctacctgacgctcaacaatggcagccaagccgtgggacgttcatccttttactgcctggaatatttcccttctcagatgctgagaacgggcaacaactttaccttcagctacacctttgaggaagtgcctttccacagcagctacgcgcacagccagagcctggaccggctgatgaatcctctcatcgaccaatacctgtattacctgaacagaactcaaaatcagtccggaagtgcccaaaacaaggacttgctgtttagccgtgggtctccagctggcatgtctgttcagcccaaaaactggctacctggaccctgttatcggcagcagcgcgtttctaaaacaaaaacagacaacaacaacagcaattttacctggactggtgcttcaaaatataacctcaatgggcgtgaatccatcatcaaccctggcactgctatggcctcacacaaagacgacgaagacaagttctttcccatgagcggtgtcatgatttttggaaaagagagcgccggagcttcaaacactgcattggacaatgtcatgattacagacgaagaggaaattaaagccactaaccctgtggccaccgaaagatttgggaccgtggcagtcaatttccagagcagcagcacagaccctgcgaccggagatgtgcatgctatgggagcattacctggcatggtgtggcaagatagagacgtgtacctgcagggtcccatttgggccaaaattcctcacacagatggacactttcacccgtctcctcttatgggcggctttggactcaagaacccgcctcctcagatcctcatcaaaaacacgcctgttcctgcgaatcctccggcggagttttcagctacaaagtttgcttcattcatcacccaatactccacaggacaagtgagtgtggaaattgaatgggagctgcagaaagaaaacagcaagcgctggaatcccgaagtgcagtacacatccaattatgcaaaatctgccaacgttgattttactgtggacaacaatggactttatactgagcctcgccccattggcacccgttaccttacccgtcccctg

SEQ ID NO: 743 - protein, 736 aa, Artificial Sequence
  Description of Artificial Sequence: Synthetic polypeptide
MAADGYLPDWLEDNLSEGIREWWDLKPGAPKPKANQQKQDDGRGLVLPGYKYLGPFNGLDKGEPVSAADAAALEHDKAYDQQLKAGDNPYLRYNHADAEFQERLQEDTSFGGNLGRAVFQAKKRVLEPLGLVEEGAKTAPGKKRPVEQSPQEPDSSSGIGKTGQQPAKERLNFGQTGDSESVPDPQPLGEPPATPAAVGPTTMASGGGAPMADNNEGADGVGNASGNWHCDSTWLGDRVITTSTRTWALPTYNNHLYKQISSASTGASNDNHYFGYSTPWGYFDFNRFHCHFSPRDWQRLINNNWGFRPKRLNFKLFNIQVKEVTTNDGVTTIANNLTSTVQVFSDSEYQLPYVLGSAHQGCLPPFPADVFMIPQYGYLTLNNGSQAVGRSSFYCLEYFPSQMLRTGNNFTFSYTFEEVPFHSSYAHSQSLDRLMNPLIDQYLYYLNRTQNQSGSAQNKDLLFSRGSPAGMSVQPKNWLPGPCYRQQRVSKTKTDNNNSNFTWTGASKYNLNGRESIINPGTAMASHKDDEDKFFPMSGVMIFGKESAGASNTALDNVMITDEEEIKATNPVATERFGTVAVNFQSSSTDPATGDVHAMGALPGMVWQDRDVYLQGPIWAKIPHTDGHFHPSPLMGGFGLKNPPPQILIKNTPVPANPPAEFSATKFASFITQYSTGQVSVEIEWELQKENSKRWNPEVQYTSNYAKSANVDFTVDNNGLYTEPRPIGTRYLTRPL

SEQ ID NO: 744 - DNA, 2208 bp, Artificial Sequence
  Description of Artificial Sequence: Synthetic polynucleotide
atggctgccgatggttatcttccagattggctcgaggacaacctctctgagggcattcgcgagtggtgggacttgaaacctggagccccgaagcccaaagccaaccagcaaaagcaggacgacggccggggtctggtgcttcctggctacaagtacctcggacccttcaacggactcgacaagggggagcccgtcaacgcggcggacgcagcggccctcgagcacgacaaggcctacgaccagcagctcaaagcgggtgacaatccgtacctgcggtataaccacgccgacgccgagtttcaggagcgtctgcaagaagatacgtcttttgggggcaacctcgggcgagcagtcttccaggccaagaagcgggttctcgaacctctcggtctggttgaggaaggcgctaagacggctcctggaaagaaacgtccggtagagcagtcgccacaagagccagactcctcctcgggcatcggcaagacaggccagcagcccgctaaaaagagactcaattttggtcagactggcgactcagagtcagtccccgatccacaacctctcggagaacctccagcaacccccgctgctgtgggacctactacaatggcttcaggcggtggcgcaccaatggcagacaataacgaaggcgccgacggagtgggtaatgcctcaggaaattggcattgcgattccacatggctgggcgacagagtcatcaccaccagcacccgcacctgggccttgcccacctacaataaccacctctacaagcaaatctccagtgcttcaacgggggccagcaacgacaaccactacttcggctacagcaccccctgggggtattttgatttcaacagattccactgccacttttcaccacgtgactggcagcgactcatcaacaacaattggggattccggcccaagagactcaacttcaaactcttcaacatccaagtcaaggaggtcacgacgaatgatggcgtcacaaccatcgctaataaccttaccagcacggttcaagtcttctcggactcggagtaccagcttccgtacgtcctcggctctgcgcaccagggctgcctccctccgttcccggcggacgtgttcatgattccgcaatacggctacctgacgctcaacaatggcagccaagccgtgggacgttcatccttttactgcctggaatatttcccttctcagatgctgagaacgggcaacaactttaccttcagctacacctttgaggaagtgcctttccacagcagctacgcgcacagccagagcctggaccggctgatgaatcctctcatcgaccaatacctgtattacctgaacagaactcaaaatcagtccggaagtgcccaaaacaaggacttgctgtttagccgtgggtctccagctggcatgtctgttcagcccaaaaactggctacctggaccctgttatcggcagcagcgcgtttctaaaacaaaaacagacaacaacaacagcaattttacctggactggtgcttcaaaatataacctcaatgggcgtgaatccatcatcaaccctggcactgctatggcctcacacaaagacgacgaagacaagttctttcccatgagcggtgtcatgatttttggaaaagagagcgccggagcttcaaacactgcattggacaatgtcatgattacagacgaaggggaaattaaagccactaaccctgtggccaccgaaagatttgggaccgtggcagtcaatttccagagcagcagcacagaccctgcgaccggagatgtgcatgctatgggagcattacctggcatggtgtggcaagatagagacgtgtacctgcagggtcccatttgggccaaaattcctcacacagatggacactttcacccgtctcctcttatgggcggctttggactcaagaacccgcctcctcagatcctcatcaaaaacacgcctgttcctgcgaatcctccggcggagttttcagctacaaagtttgcttcattcatcacccaatactccacaggacaagtgagtgtggaaattgaatgggagctgcagaaagaaaacagcaagcgctggaatcccgaagtgcagtacacatccaattatgcaaaatctgccaacgttgattttactgtggacaacaatggactttatactgagcctcgccccattggcacccgttaccttacccgtcccctg

SEQ ID NO: 745 - protein, 736 aa, Artificial Sequence
  Description of Artificial Sequence: Synthetic polypeptide
MAADGYLPDWLEDNLSEGIREWWDLKPGAPKPKANQQKQDDGRGLVLPGYKYLGPFNGLDKGEPVNAADAAALEHDKAYDQQLKAGDNPYLRYNHADAEFQERLQEDTSFGGNLGRAVFQAKKRVLEPLGLVEEGAKTAPGKKRPVEQSPQEPDSSSGIGKTGQQPAKKRLNFGQTGDSESVPDPQPLGEPPATPAAVGPTTMASGGGAPMADNNEGADGVGNASGNWHCDSTWLGDRVITTSTRTWALPTYNNHLYKQISSASTGASNDNHYFGYSTPWGYFDFNRFHCHFSPRDWQRLINNNWGFRPKRLNFKLFNIQVKEVTTNDGVTTIANNLTSTVQVFSDSEYQLPYVLGSAHQGCLPPFPADVFMIPQYGYLTLNNGSQAVGRSSFYCLEYFPSQMLRTGNNFTFSYTFEEVPFHSSYAHSQSLDRLMNPLIDQYLYYLNRTQNQSGSAQNKDLLFSRGSPAGMSVQPKNWLPGPCYRQQRVSKTKTDNNNSNFTWTGASKYNLNGRESIINPGTAMASHKDDEDKFFPMSGVMIFGKESAGASNTALDNVMITDEGEIKATNPVATERFGTVAVNFQSSSTDPATGDVHAMGALPGMVWQDRDVYLQGPIWAKIPHTDGHFHPSPLMGGFGLKNPPPQILIKNTPVPANPPAEFSATKFASFITQYSTGQVSVEIEWELQKENSKRWNPEVQYTSNYAKSANVDFTVDNNGLYTEPRPIGTRYLTRPL

SEQ ID NO: 746 - DNA, 2208 bp, Artificial Sequence
  Description of Artificial Sequence: Synthetic polynucleotide
atggctgccgatggttatcttccagattggctcgaggacaaccttagtgaaggaattcgcgagtggtgggctttgaaacctggagcccctcaacccaaggcaaatcaacaacatcaagacaacgctcgaggtcttgtgcttccgggttacaaataccttggacccggcaacggactcgacaagggggagccggtcaatgcagcagacgcggcggccctcgagcacgacaaggcctacgaccagcagctcaaggccggagacaacccgtacctcaagtacaaccacgccgacgccgagttccaggagcggctcaaagaagatacgtcttttgggggcaacctcgggcgagcagtcttccagaccaaaaagaggcttcttgaacctcttggtctggttgaggaagcggctaagacggctcctggaaagaagaggcctgtagagcagtctcctcaggaaccgggctcctccgcgggtattggcaaatcgggtgcacagcccgctaaaaagagactcaatttcggtcagactggcgacacagagtcagtcccagaccctcaaccaatcggagaacctcccgcagccccctcaggtgtgggatctcttacaatggcttcaggtggtggcgcaccagtggcagacaataacgaaggtgccgatggagtgggtagttcctcgggaaattggcattgcgattcccaatggctgggggacagagtcatcaccaccagcacccgaacctgggccctgcccacctacaacaatcacctctacaagcaaatctccaacagcacatctggaggatcttcaaatgacaacgcctacttcggctacagcaccccctgggggtattttgacttcaacagattccactgccacttctcaccacgtgactggcagcgactcatcaacaacaactggggattccggcctaagcgactcaacttcaagctcttcaacattcaggtcaaagaggttacggacaacaatggagtcaagaccatcgccaataaccttaccagcacggtccaggtcttcacggactcagactatcagctcccgtacgtgctcgggtcggctcacgagggctgcctcccgccgttcccagcggacgttttcatgattcctcagtacgggtatctgacgcttaatgatggaagccaggccgtgggtcgttcgtccttttactgcctggaatatttcccgtcgcaaatgctaagaacgggtaacaacttccagttcagctacgagtttgagaacgtacctttccatagcagctacgctcacagccaaagcctggaccgactaatgaatccactcatcgaccaatacttgcactatctctcaaagactattaacggttctggacagaatcaacaaacgctaaaattcagtgtggccggacccagcaacatggctgtccagggaagaaactacatacctggacccagctaccgacaacaacgtgtctcaaccactgtgactcaaaacaacaacagcgaatttgcttggcctggagcttcttcttgggctctcaatggacgtaatagcttgatgaatcctggacctgctatggccagccacaaagaaggagaggaccgtttctttcctttgtctggatctttaatttttggcaaacaaggaactggaagagacaacgtggatgcggacaaagtcatgataaccaacgaagaagaaattaaaactactaacccggtagcaacggagtcctatggacaagtggccacaaaccaccagagtgcccaagcacaggcgcagaccggctgggttcaaaaccaaggaatacttccgggtatggtttggcaggacagagatgtgtacctgcaaggacccatttgggccaaaattcctcacacggacggcaactttcacccttctccgctgatgggagggtttggaatgaagcacccgcctcctcagatcctcatcaaaaacacacctgtacctgcggatcctccaacggccttcaacaaggacaagctgaactctttcatcacccagtattctactggccaagtcagcgtggagatcgagtgggagctgcagaaggaaaacagcaagcgctggaacccggagatccagtacacttccaactattacaagtctaataatgttgaatttgctgttaatactgaaggtgtatatagtgaaccccgccccattggcaccagatacctgactcgtaatctg

SEQ ID NO: 747 - protein, 736 aa, Artificial Sequence
  Description of Artificial Sequence: Synthetic polypeptide
MAADGYLPDWLEDNLSEGIREWWALKPGAPQPKANQQHQDNARGLVLPGYKYLGPGNGLDKGEPVNAADAAALEHDKAYDQQLKAGDNPYLKYNHADAEFQERLKEDTSFGGNLGRAVFQTKKRLLEPLGLVEEAAKTAPGKKRPVEQSPQEPGSSAGIGKSGAQPAKKRLNFGQTGDTESVPDPQPIGEPPAAPSGVGSLTMASGGGAPVADNNEGADGVGSSSGNWHCDSQWLGDRVITTSTRTWALPTYNNHLYKQISNSTSGGSSNDNAYFGYSTPWGYFDFNRFHCHFSPRDWQRLINNNWGFRPKRLNFKLFNIQVKEVTDNNGVKTIANNLTSTVQVFTDSDYQLPYVLGSAHEGCLPPFPADVFMIPQYGYLTLNDGSQAVGRSSFYCLEYFPSQMLRTGNNFQFSYEFENVPFHSSYAHSQSLDRLMNPLIDQYLHYLSKTINGSGQNQQTLKFSVAGPSNMAVQGRNYIPGPSYRQQRVSTTVTQNNNSEFAWPGASSWALNGRNSLMNPGPAMASHKEGEDRFFPLSGSLIFGKQGTGRDNVDADKVMITNEEEIKTTNPVATESYGQVATNHQSAQAQAQTGWVQNQGILPGMVWQDRDVYLQGPIWAKIPHTDGNFHPSPLMGGFGMKHPPPQILIKNTPVPADPPTAFNKDKLNSFITQYSTGQVSVEIEWELQKENSKRWNPEIQYTSNYYKSNNVEFAVNTEGVYSEPRPIGTRYLTRNL

SEQ ID NO: 748 - DNA, 2208 bp, Artificial Sequence
  Description of Artificial Sequence: Synthetic polynucleotide
atggctgccgatggttattttccagattggctcgaggacaaccttagtgaaggaattcgcgagtggtgggctttgaaacctggagcccctcaacccaaggcaaatcaacaacatcaagacaacgctcgaggtcttgtgcttccgggttacaaataccttggacccggcaacggactcgacaagggggagccggtcaacgcagcagacgcggcggccctcgagcacgacaaggcctacgaccagcagctcaaggccggagacaacccgtacctcaagtacaaccacgccgacgccgagttccaggagcggctcaaagaagatacgtcttttgggggcaacctcgggcgagcagtcttccaggccaaaaagaggcttcttgaacctcttggtctggttgaggaagcggctaagacggctcctggaaagaagaggcctgtagagcagtctcctcaggaaccggactcctccgcgggtattggcaaatcgggtgcacagcccgctaaaaagagactcaatttcggtcagactggcgacacagagtcagtcccagaccctcaaccaatcggagaatctcccgcagccccctcaggtgtgggatctcttacaatggcttcaggtggtggcgcaccagtggcagacaataacgaaggtgccgatggagtgggtagttcctcgggaaattggcattgcgattcccaatggctgggggacagagtcatcaccaccagcacccgaacctgggccctgcccacctacaacaatcacctctacaagcaaatctccaacagcacatctggaggatcttcaaatgacaacgcctacttcggctacagcaccccctgggggtattttgacttcaacagattccactgccacttctcaccacgtgactggcagcgactcatcaacaacaactggggattccggcctaagcgactcaacttcaagctcttcaacattcaggtcaaagaggttacggacaacaatggagtcaagaccatcgccaataaccttaccagcacggtccaggtcttcacggactcagactatcagctcccgtacgtgctcgggtcggctcacgagggctgcctcccgccgttcccagcggacgttttcatgattcctcagtacgggtatctgacgcttaatgatggaagccaggccgtgggtcgttcgtccttttactgcctggaatatctcccgtcgcaaatgctaagaacgggtaacaacttccagttcagctacgagtttgagaacgtacctttccatagcagctacgctcacagccaaagcctggaccgactaatgaatccactcatcgaccaatacttgcactatctctcaaagactattaacggttctggacagaatcaacaaacgctaaaattcagtgtggccggacccagcaacatggctgtccagggaagaaactacatacctggacccagctaccgacaacaacgtgtctcaaccactgtgactcaaaacaacaacagcgaatttgcttggcctggagcttcttcttgggctctcaatggacgtaatagcttgatgaatcctggacctgctgtggccagccacaaagaaggagaggaccgtttctttcctttgtctggatctttaatttttggcaaacaaggaactggaagagacaacgtggatgcggacaaagtcatgataaccaacgaagaagaaattaaaactactaacccggtagcaacggagtcctatggacaagtggccacaaaccaccagagtgcccaagcacaggcgcagaccggctgggttcaaaaccaaggaatacttccgggtatggtttggcaggacagagatgtgtacctgcaaggacccatttgggccaaaattcctcacacggacggcaactttcacccttctccgctgatgggagggtttggaatgaagcacccgcctcctcagatcctcatcaaaaacacacctgtacctgcggatcctccaacggccttcaacaaggacaagctgaactctttcatcacccagtattctactggccaagtcagcgtggagatcgagtgggagctgcagaaggaaaacagcaagcgctggaacccggagatccagtacacttccaactattacaagtctaataatgttgaatttgctgttaatactgaaggtgtatatagtgaaccccgccccattggcaccagatacctgactcgtaatctg

SEQ ID NO: 749 - protein, 736 aa, Artificial Sequence
  Description of Artificial Sequence: Synthetic polypeptide
MAADGYFPDWLEDNLSEGIREWWALKPGAPQPKANQQHQDNARGLVLPGYKYLGPGNGLDKGEPVNAADAAALEHDKAYDQQLKAGDNPYLKYNHADAEFQERLKEDTSFGGNLGRAVFQAKKRLLEPLGLVEEAAKTAPGKKRPVEQSPQEPDSSAGIGKSGAQPAKKRLNFGQTGDTESVPDPQPIGESPAAPSGVGSLTMASGGGAPVADNNEGADGVGSSSGNWHCDSQWLGDRVITTSTRTWALPTYNNHLYKQISNSTSGGSSNDNAYFGYSTPWGYFDFNRFHCHFSPRDWQRLINNNWGFRPKRLNFKLFNIQVKEVTDNNGVKTIANNLTSTVQVFTDSDYQLPYVLGSAHEGCLPPFPADVFMIPQYGYLTLNDGSQAVGRSSFYCLEYLPSQMLRTGNNFQFSYEFENVPFHSSYAHSQSLDRLMNPLIDQYLHYLSKTINGSGQNQQTLKFSVAGPSNMAVQGRNYIPGPSYRQQRVSTTVTQNNNSEFAWPGASSWALNGRNSLMNPGPAVASHKEGEDRFFPLSGSLIFGKQGTGRDNVDADKVMITNEEEIKTTNPVATESYGQVATNHQSAQAQAQTGWVQNQGILPGMVWQDRDVYLQGPIWAKIPHTDGNFHPSPLMGGFGMKHPPPQILIKNTPVPADPPTAFNKDKLNSFITQYSTGQVSVEIEWELQKENSKRWNPEIQYTSNYYKSNNVEFAVNTEGVYSEPRPIGTRYLTRNL

SEQ ID NO: 750 - DNA, 2208 bp, Artificial Sequence
  Description of Artificial Sequence: Synthetic polynucleotide
atggctgccgatggttatcttccagattggctcgaggacaaccttagtgaaggaattcgcgagtggtgggctttgaaacctggagcccctcaacccaaggcaaatcaacaacatcaagacaacgctcgaggtcttgtgcttccgggttacaaataccttggacccggcaacggactcgacaagggggagccggtcaacgcagcagacgcggcggccctcgagcacgacaaggcctacgaccagcagctcaaggccggagacaacccgtacctcaagtacaaccacgccgacgccgagttccaggagcggctcaaagaagatacgtcttttgggggcaacctcgggcgagcagtcttccaggccaaaaagaggcttcttgaacctcttggtccggttgaggaagcggctaagacggctcctggaaagaagaggcctgtagagcagtctcctcaggaaccggactcctccgcgggtattggcaaatcgggtgcacagcccgctaaaaagagactcaatttcggtcagactggcgacacagagtcagtcccagaccctcaaccaatcggagaacctcccgcagccccctcaggtgtgggatctcttacaatggcttcaggtggtggcgcaccagtggcagacaataacgaaggtgccgatggagtgggtagttcctcgggaaattggcattgcgattcccaatggctgggggacagagtcatcaccaccagcacccgaacctgggccctgcccacctacaacaatcacctctacaagcaaatctccaacagcacatctggaggatcttcaaatgacaacgcctacttcggctacagcaccccctgggggtattttgacttcaacagattccactgccacttctcaccacgtgactggcagcgactcatcaacaacaactggggattccggcctaagcgactcaacttcaagctcttcaacattcaggtcaaagaggttacggacaacaatggagtcaagaccatcgccaataaccttaccagcacggtccaggtcttcacggactcagactatcagctcccgtacgtgctcgggtcggctcacgagggctgcctcccgccgttcccagcggacgttttcatgattcctcagtacgggtatctgacgcttaatgatggaagccaggccgtgggtcgttcgtccttttactgcctggaatatttcccgtcgcaaatgctaagaacgggtaacaacttccagttcagctacgagtttgagaacgtacctttccatagcagctacgctcacagccaaagcctggaccgactaatgaatccactcatcgaccaatacttgtactatctctcaaagactattaacggttctggacagaatcaacaaacgctaaaattcagtgtggccggacccagcaacatggctgtccagggaagaaactacatacctggacccagctaccgacaacaacgtgtctcaaccactgtgactcaaaacaacaacagcgaatttgcttggcctggagcttcttcttgggctctcaatggacgtaatagcttgatgaatcctggacctgctatggccagccacaaagaaggagaggaccgtttctttcctttgtctggatctttaatttttggcaaacaaggaactggaagagacaacgtggatgcggacaaagtcatgataaccaacgaagaagaaattaaaactactaacccggtagcaacggagtcctatggacaagcggccacaaaccaccagagtgcccaagcacaggcgcagaccggctgggttcaaaaccaaggaatacttccgggtatggtttggcaggacagagatgtgtacctgcaaggacccatttgggccaaaattcctcacacggacggcaactttcacccttctccgctgatgggagggtttggaatgaagcacccgcctcctcagatcctcatcaaaaacacacctgtacctgcggatcctccaacggccttcaacaaggacaagctgaactctttcatcacccagtattctactggccaagtcagcgtggagatcgagtgggagctgcagaaggaaaacagcaagcgctggaacccggagatccagtacacttccaactattacaagtctaataatgttgaatttgctgttaatactgaaggtgtatatagtgaaccccgccccattggcaccagatacctgactcgtaatctg

SEQ ID NO: 751 - protein, 736 aa, Artificial Sequence
  Description of Artificial Sequence: Synthetic polypeptide
MAADGYLPDWLEDNLSEGIREWWALKPGAPQPKANQQHQDNARGLVLPGYKYLGPGNGLDKGEPVNAADAAALEHDKAYDQQLKAGDNPYLKYNHADAEFQERLKEDTSFGGNLGRAVFQAKKRLLEPLGPVEEAAKTAPGKKRPVEQSPQEPDSSAGIGKSGAQPAKKRLNFGQTGDTESVPDPQPIGEPPAAPSGVGSLTMASGGGAPVADNNEGADGVGSSSGNWHCDSQWLGDRVITTSTRTWALPTYNNHLYKQISNSTSGGSSNDNAYFGYSTPWGYFDFNRFHCHFSPRDWQRLINNNWGFRPKRLNFKLFNIQVKEVTDNNGVKTIANNLTSTVQVFTDSDYQLPYVLGSAHEGCLPPFPADVFMIPQYGYLTLNDGSQAVGRSSFYCLEYFPSQMLRTGNNFQFSYEFENVPFHSSYAHSQSLDRLMNPLIDQYLYYLSKTINGSGQNQQTLKFSVAGPSNMAVQGRNYIPGPSYRQQRVSTTVTQNNNSEFAWPGASSWALNGRNSLMNPGPAMASHKEGEDRFFPLSGSLIFGKQGTGRDNVDADKVMITNEEEIKTTNPVATESYGQAATNHQSAQAQAQTGWVQNQGILPGMVWQDRDVYLQGPIWAKIPHTDGNFHPSPLMGGFGMKHPPPQILIKNTPVPADPPTAFNKDKLNSFITQYSTGQVSVEIEWELQKENSKRWNPEIQYTSNYYKSNNVEFAVNTEGVYSEPRPIGTRYLTRNL

SEQ ID NO: 752 - DNA, 2208 bp, Artificial Sequence
  Description of Artificial Sequence: Synthetic polynucleotide
atggctgccgatggttatcttccagattggctcgaggacaaccttagtgaaggaattcgcgagtggtgggctttgaaacctggagcccctcaacccaaggcaaatcaacaacatcaagacaacgctcggggtcttgtgcttccgggttacaaataccttggacccggcaacggactcgacaagggggagccggtcaacgcagcagacgcggcggccctcgagcacgacaaggcctacgaccagcagctcaaggccggagacaacccgtacctcaagtacaaccacgccgacgccgagttccaggagcggctcaaagaagatacgtcttttgggggcaacctcgggcgagcagtcttccaggccaaaaagaggcttcttgaacctcttggtccggttgaggaagcggctaagacggctcctggaaagaagaggcctgtagagcagtctcctcaggaaccggactcctccgcgggtattggcaaatcgggtgcacagcccgctaaaaagagactcaatttcggtcagactggcgacacagagtcagtcccagaccctcaaccaatcggagaacctcccgcagccccctcaggtgtgggatctcttacaatggcttcaggtggtggcgcaccagtggcagacaataacgaaggtgccgatggagtgggtagttcctcgggaaattggcattgcgattcccaatggctgggggacagagtcatcaccaccagcacccgaacctgggccctgcccacctacaacaatcacctctacaagcaaatctccaacagcacatctggaggatcttcaaatgacaacgcctacttcggctacagcaccccctgggggtattttgacttcaacagattccactgccacttctcaccacgtgactggcggcgactcatcaacaacaactggggattccggcctaagcgactcaacttcaagctcttcaacattcaggtcaaagaggttacggacaacaatggagtcaagaccatcgccaataaccttaccagcacggtccaggtcttcacggactcagactatcagctcccgtacgtgctcgggtcggctcacgagggctgcctcccgccgttcccagcggacgttttcatgattcctcagtacgggtatctgacgcttaatgatggaagccaggccgtgggtcgttcgtccttttactgcctggaatatttcccgtcgcaaatgctaagaacgggtaacaacttccagttcagctacgagtttgagaacgtacctttccatagcagctacgctcacagccaaagcctggaccgactaatgaatccactcatcgaccaatacttgtactatctctcaaagactattaacggttctggacagaatcaacaaacgctaaaattcagtgtggccggacccagcaacatggctgtccagggaagaaactacatacctggacccagctaccgacaacaacgtgtctcaaccactgtgactcaaaacaacaacagcgaatttgcttggcctggagcttcttcttgggctctcaatggacgtaatagcttgatgaatcctggacctgctatggccagccacaaagaaggagaggaccgtttctttcctttgtctggatctttaatttttggcaaacaaggaactggaagagacaacgtggatgcggacaaagtcatgataaccaacgaagaagaaattaaaactactaacccggtagcaacggagtcctatggacaagtggccacaaaccaccagagtgcccaagcacaggcgcagaccggctgggttcaaaaccaaggaatacttccgggtatggtttggcaggacagagatgtgtacctgcaaggacccatttgggccaaaattcctcacacggacggcaactttcacccttctccgctgatgggagggtttggaatgaagcacccgcctcctcagatcctcatcaaaaacacacctgtacctgcggatcctccaacggccttcaacaaggacaagctgaactctttcatcacccagtattctactggccaagtcagcgtggagatcgagtgggagctgcagaaggaaaacagcaagcgctggaacccggagatccagtacacttccaactattacaagtctaataatgttgaatttgctgttaatactgaaggtgtatatagtgaaccccgccccattggcaccagatacctgactcgtaatctg

SEQ ID NO: 753 - protein, 736 aa, Artificial Sequence
  Description of Artificial Sequence: Synthetic polypeptide
MAADGYLPDWLEDNLSEGIREWWALKPGAPQPKANQQHQDNARGLVLPGYKYLGPGNGLDKGEPVNAADAAALEHDKAYDQQLKAGDNPYLKYNHADAEFQERLKEDTSFGGNLGRAVFQAKKRLLEPLGPVEEAAKTAPGKKRPVEQSPQEPDSSAGIGKSGAQPAKKRLNFGQTGDTESVPDPQPIGEPPAAPSGVGSLTMASGGGAPVADNNEGADGVGSSSGNWHCDSQWLGDRVITTSTRTWALPTYNNHLYKQISNSTSGGSSNDNAYFGYSTPWGYFDFNRFHCHFSPRDWRRLINNNWGFRPKRLNFKLFNIQVKEVTDNNGVKTIANNLTSTVQVFTDSDYQLPYVLGSAHEGCLPPFPADVFMIPQYGYLTLNDGSQAVGRSSFYCLEYFPSQMLRTGNNFQFSYEFENVPFHSSYAHSQSLDRLMNPLIDQYLYYLSKTINGSGQNQQTLKFSVAGPSNMAVQGRNYIPGPSYRQQRVSTTVTQNNNSEFAWPGASSWALNGRNSLMNPGPAMASHKEGEDRFFPLSGSLIFGKQGTGRDNVDADKVMITNEEEIKTTNPVATESYGQVATNHQSAQAQAQTGWVQNQGILPGMVWQDRDVYLQGPIWAKIPHTDGNFHPSPLMGGFGMKHPPPQILIKNTPVPADPPTAFNKDKLNSFITQYSTGQVSVEIEWELQKENSKRWNPEIQYTSNYYKSNNVEFAVNTEGVYSEPRPIGTRYLTRNL

SEQ ID NO: 754 - DNA, 2208 bp, Artificial Sequence
  Description of Artificial Sequence: Synthetic polynucleotide
atggctgccgatggttatcttccagattggctcgaggacaaccttagtgaaggaattcgcgagtggtgggctttgaaacctggagcccctcaacccaaggcaaatcaacaacatcaagacaacgctcgaggtcttgtgcttccgggttacaaataccttggacccggcaacggactcgacaagggggagccggtcaacgcagcagacgcggcggccctcgagcacgacaaggcctacgaccagcagctcaaggccggagacaacctgtacctcaagtacaaccacgccgacgccgagttccaggagcggctcaaagaagatacgtcttttgggggcaacctcgggcgagcagtcttccaggccaaaaagaggcttcttgaacctcttggtctggttgaggaagcggctaagacggctcctggaaagaagaggcctgtagagcagtctcctcaggaaccggactcctccgcgggtattggcaaatcgggtgcacagcccgctaaaaagagactcaatttcggtcagactggcgacacagagtcagtcccagaccctcaaccaatcggagaacctcccgcagccccctcaggtgtgggatctcttacaatggcttcaggtggtggcgcaccagtggcagacaataacgaaggtgccgatggagtgggtagttcctcgggaaattggcattgcgattcccaatggctgggggacagagtcatcaccaccagcacccgaacctgggccctgcccacctacaacaatcacctctacaagcaaatctccaacagcacatctggaggatcttcaaatgacaacgcctacttcggctacagcaccccctgggggtattttgacttcaacagattccactgccacttctcaccacgtgactggcagcgactcatcaacaacaactggggattccggcctaagcgactcaacttcaagctcttcaacattcaggtcaaagaggttacggacaacaatggagtcaagaccatcgccaataaccttaccagcacggtccaggtcttcacggactcagactatcagctcccgtacgtgctcgggtcggctcacgagggctgcctcccgccgttcccagcggacgttttcatgattcctcagtacgggtatctgacgcttaatgatggaagccaggccgtgggtcgttcgtccttttactgcctggaatatttcccgtcgcaaatgctaagaacgggtaacaacttccagttcagctacgagtttgagaacgtacctttccatagcagctacgctcacagccaaagcctggaccgactaatgaatccactcatcgaccaatacttgcactatctctcaaagactattaacggttctggacagaatcaacaaacgctaaaattcagtgtggccggacccagcaacatggctgtccagggaagaaactacatacctggacccagctaccgacaacaacgtgtctcaaccactgtgactcaaaacaacaacagcgaatttgcttggcctggagcttcttcttgggctctcaatggacgtaatagcttgatgaatcctggacctgctatggccagccacaaagaaggagaggaccgtttctttcctttgtctggatctttaatttttggcaaacaaggaactggaagagacaacgtggatgcggacaaagtcatgataaccaacgaagaagaaattaaaactactaacccggtagcaacggagtcctatggacaagtggccacaaaccaccagagtgcccaagcacaggcgcagaccggctgggttcaaaaccaaggaatacttccgggtatggtttggcaggacagagatgtgtacctgcaaggacccatttgggccaaaattcctcacacggacggcaactttcacccttctccgctgatgggagggtttggaatgaagcacccgcctcctcagatcctcatcaaaaacacacctgtacctgcggatcctccaacggccttcaacaaggacaagctgaactctttcatcacccagtattctactggccaagtcagcgtggagatcgagtgggagctgcagaaggaaaacagcaagcgctggaacccggagatccagtacacttccaactattacaagtctaataatgttgaatttgctgttaatactgaaggtgtatatagtgaaccccgccccattggcaccagatacctgactcgtaatctg

SEQ ID NO: 755 - protein, 736 aa, Artificial Sequence
  Description of Artificial Sequence: Synthetic polypeptide
MAADGYLPDWLEDNLSEGIREWWALKPGAPQPKANQQHQDNARGLVLPGYKYLGPGNGLDKGEPVNAADAAALEHDKAYDQQLKAGDNLYLKYNHADAEFQERLKEDTSFGGNLGRAVFQAKKRLLEPLGLVEEAAKTAPGKKRPVEQSPQEPDSSAGIGKSGAQPAKKRLNFGQTGDTESVPDPQPIGEPPAAPSGVGSLTMASGGGAPVADNNEGADGVGSSSGNWHCDSQWLGDRVITTSTRTWALPTYNNHLYKQISNSTSGGSSNDNAYFGYSTPWGYFDFNRFHCHFSPRDWQRLINNNWGFRPKRLNFKLFNIQVKEVTDNNGVKTIANNLTSTVQVFTDSDYQLPYVLGSAHEGCLPPFPADVFMIPQYGYLTLNDGSQAVGRSSFYCLEYFPSQMLRTGNNFQFSYEFENVPFHSSYAHSQSLDRLMNPLIDQYLHYLSKTINGSGQNQQTLKFSVAGPSNMAVQGRNYIPGPSYRQQRVSTTVTQNNNSEFAWPGASSWALNGRNSLMNPGPAMASHKEGEDRFFPLSGSLIFGKQGTGRDNVDADKVMITNEEEIKTTNPVATESYGQVATNHQSAQAQAQTGWVQNQGILPGMVWQDRDVYLQGPIWAKIPHTDGNFHPSPLMGGFGMKHPPPQILIKNTPVPADPPTAFNKDKLNSFITQYSTGQVSVEIEWELQKENSKRWNPEIQYTSNYYKSNNVEFAVNTEGVYSEPRPIGTRYLTRNL

SEQ ID NO: 756 - DNA, 2208 bp, Artificial Sequence
  Description of Artificial Sequence: Synthetic polynucleotide
atggctgccgatggttatcttccagattggctcgaggacaaccttagtgaaggaattcgcgagtggtgggctttgaaacctggagcccctcaacccaaggcaaatcaacaacatcaagacaacgctcgaggtcttgtgcttccgggttacaaataccttggacccggcaacggactcgacaagggggagccggtcaacgcagcagacgcggcggccctcgagcacgacaaggcctacgaccagcagctcaaggccggagacaacccgtacctcaagtacaaccacgccgacgccgagttccaggagcggctcaaagaagatacgtcttttgggggcaacctcgggcgagcagtcttccaggccaaaaagaggcttcttgaacctcttggtctggttgaggaagcggctaagacggctcctggaaagaagaggcctgtagagcagtctcctcaagaaccggactcctccgcgggtattggcaaatcgggtgcacagcccgctaaaaagagactcaatttcggtcagactggcgacacagagtcagtcccagaccctcaaccaatcggagaacctcccgcagccccctcaggtgtgggatctcttacaatggcttcaggtggtggcgcaccagtggcagacaataacgaaggtgccgatggagtgggtagttcctcgggaaattggcattgcgattcccaatggctgggggacagagtcatcaccaccagcacccgaacctgggccctgcccacctacaacaatcacctctacaagcaaatctccaacagcacatctggaggatcttcaaatgacaacgcctacttcggctacagcaccccctgggggtattttgacttcaacagattccactgccacttctcaccacgtgactggcagcgactcatcaacaacaactggggattccggcctaagcgactcaacttcaagctcttcaacattcaggtcaaagaggttacggacaacaatggagtcaagaccatcgccaataaccttaccagcacggtccaggtcttcacggactcagactatcagctcccgtacgtgctcgggtcggctcacgagggctgcctcccgccgttcccagcggacgttttcatgattcctcagtacgggtatctgacgcttaatgatggaagccaggccgtgggtcgttcgtccttttactgcctggaatatttcccgtcgcaaatgctaagaacgggtaacaacttccagttcagctacgagtttgagaacgtacctttccatagcagctacgctcacagccaaagcctggaccgactaatgaatccactcatcgaccaatacttgcactatctctcaaagactattaacggttctggacagaatcaacaaacgctaaaattcagtgtggccggacccagcaacatggctgtccagggaagaaactacatacctggacccagctaccgacaacaacgtgtctcaaccactgtgactcaaaacaacaacagcgaatttgcttggcctggagcttcttcttgggctctcaatggacgtaatagcttgatgaatcctggacctgctatggccagccacaaagaaggagaggaccgtttctttcctttgtctggatctttaatttttggcaaacaaggaactggaagagacaacgtggatgcggacaaagtcatgataaccaacgaagaagaaattaaaactactaacccggtagcaacggagtcctatggacaagtggccacaaaccaccagagtgcccaagcacaggcgcagaccggctgggttcaaaaccaaggaatacttccgggtatggtttggcaggacagagatgtgtacctgcaaggacccatttgggccaaaattcctcacacggacggcaactttcacccttctccgctgatgggagggtttggaatgaagcacccgcctcctcagatcctcatcaaaaacacacctgtacctgcggatcctccaacggccttcaacaaggacaagctgaactctttcatcacccagtattctactggccaagtcagcgtggagatcgagtgggagctgcagaaggaaaacagcaagcgctggaacccggagatccagtacacttccaactattacaagtctaataatgttgaatttgctgttaatactgaaggtgtatatagtgaaccccgccccattggcaccagatacctgactcgtaatctg

SEQ ID NO: 757 - protein, 736 aa, Artificial Sequence
  Description of Artificial Sequence: Synthetic polypeptide
MAADGYLPDWLEDNLSEGIREWWALKPGAPQPKANQQHQDNARGLVLPGYKYLGPGNGLDKGEPVNAADAAALEHDKAYDQQLKAGDNPYLKYNHADAEFQERLKEDTSFGGNLGRAVFQAKKRLLEPLGLVEEAAKTAPGKKRPVEQSPQEPDSSAGIGKSGAQPAKKRLNFGQTGDTESVPDPQPIGEPPAAPSGVGSLTMASGGGAPVADNNEGADGVGSSSGNWHCDSQWLGDRVITTSTRTWALPTYNNHLYKQISNSTSGGSSNDNAYFGYSTPWGYFDFNRFHCHFSPRDWQRLINNNWGFRPKRLNFKLFNIQVKEVTDNNGVKTIANNLTSTVQVFTDSDYQLPYVLGSAHEGCLPPFPADVFMIPQYGYLTLNDGSQAVGRSSFYCLEYFPSQMLRTGNNFQFSYEFENVPFHSSYAHSQSLDRLMNPLIDQYLHYLSKTINGSGQNQQTLKFSVAGPSNMAVQGRNYIPGPSYRQQRVSTTVTQNNNSEFAWPGASSWALNGRNSLMNPGPAMASHKEGEDRFFPLSGSLIFGKQGTGRDNVDADKVMITNEEEIKTTNPVATESYGQVATNHQSAQAQAQTGWVQNQGILPGMVWQDRDVYLQGPIWAKIPHTDGNFHPSPLMGGFGMKHPPPQILIKNTPVPADPPTAFNKDKLNSFITQYSTGQVSVEIEWELQKENSKRWNPEIQYTSNYYKSNNVEFAVNTEGVYSEPRPIGTRYLTRNL

SEQ ID NO: 758 - DNA, 2208 bp, Artificial Sequence
  Description of Artificial Sequence: Synthetic polynucleotide
  misc_feature (1325)..(1325): n is a, c, g, or t
atggctgccgatggttatcttccagattggctcgaggacaaccttagtgaaggaattcgcgagtggtgggctttgaaacctggagcccctcaacccaaggcaaatcaacaacatcaagacaacgctcgaggtcttgtgcttccgggttacaaataccttggacccggcaacggactcgacaagggggagccggtcaacgcagcagacgcggcggccctcgagcacgacaaggcctacgaccagcagctcaaggccggagacaacccgtacctcaagtacaaccacgccgacgccgagttccaggagcggctcaaagaagatacgtcttttgggggcaacctcgggcgagcagtcttccaggccaaaaagaggcttcttgaacctcttggtctggttgaggaagcggctaagacggctcctggaaagaagaggcctgtagagcagtctcctcaggaaccggactcctccgcgggtattggcaaatcgggtgcacagcccgctaaaaagagactcaatttcggtcagactggcgacacagagtcagtcccagaccctcaaccaatcggagaacctcccgcagccccctcaggtgtgggatctcttacaatggcttcaggtggtggcgcaccagtggcagacaataacgaaggtgccgatggagtgggtagttcctcgggaaattggcattgcgattcccaatggctgggggacagagtcatcaccaccagcacccgaacctgggccctgcccacctacaacaatcacctctacaagcaaatctccaccagcacatctggaggatcttcaaatgacaacgcctacttcggctacagcaccccctgggggtattttgacttcaacagattccactgccacttctcaccacgtgactggcagcgactcatcaacaacaactggggattccggcctaagcgactcaacttcaagctcttcaacattcaggtcaaagaggttacggacaacaatggagtcaagaccatcgccaataaccttaccagcacggtccaggtcttcacggactcagactatcagctcccgtacgtgctcgggtcggctcacgagggctgcctcccgccgttcccagcggacgttttcatgattcctcagtacgggtatctgacgcttaatgatggaagccaggccgtgggtcgttcgtccttttactgcctggaatatttcccgtcgcaaatgctaagaacgggtaacaacttccagttcagctacgagtttgagaacgtacctttccatagcagctacgctcacagccaaagcctggaccgactaatgaatccactcatcgaccnatacttgcactatctctcaaagactattaacggttctggacagaatcaacaaacgctaaaattcagtgtggccggacccagcaacatggctgtccagggaagaaactacatacctggacccagctaccgacaacaacgtgtctcaaccactgtgactcaaaacaacaacagcgaatttgcttggcctggagcttcttcttgggctctcaatggacgtaatagcttgatgaatcctggacctgctatggccagccacaaagaaggagaggaccgtttctttcctttgtctggatctttaatttttggcaaacaaggaactggaagagacaacgtggatgcggacaaagtcatgataaccaacgaagaagaaattaaaactactaacccggtagcaacggagtcctatggacaagtggccacaaaccaccagagtgcccaagcacaggcgcagaccggctgggttcaaaaccaaggaatacttccggatatggtttggcaggacagagatgtgtacctgcaaggacccatttgggccaaaattcctcacacggacggcaactttcacccttctccgctgatgggagggtttggaatgaagcacccgcctcctcagatcctcatcaaaaacacacctgtacctgcggatcctccaacggccttcaacaaggacaagctgaactctttcatcacccagtattctactggccaagtcagcgtggagatcgagtgggagctgcagaaggaaaacagcaagcgctggaacccggagatccagtacacttccaactattacaagtctaataatgttgaatttgctgttaatactgaaggtgtatatagtgaaccccgccccattggcaccagatacctgactcgtaatctg

SEQ ID NO: 759 - protein, 736 aa, Artificial Sequence
  Description of Artificial Sequence: Synthetic polypeptide
  MOD_RES (442)..(442): Xaa = any naturally occurring amino acid
MAADGYLPDWLEDNLSEGIREWWALKPGAPQPKANQQHQDNARGLVLPGYKYLGPGNGLDKGEPVNAADAAALEHDKAYDQQLKAGDNPYLKYNHADAEFQERLKEDTSFGGNLGRAVFQAKKRLLEPLGLVEEAAKTAPGKKRPVEQSPQEPDSSAGIGKSGAQPAKKRLNFGQTGDTESVPDPQPIGEPPAAPSGVGSLTMASGGGAPVADNNEGADGVGSSSGNWHCDSQWLGDRVITTSTRTWALPTYNNHLYKQISTSTSGGSSNDNAYFGYSTPWGYFDFNRFHCHFSPRDWQRLINNNWGFRPKRLNFKLFNIQVKEVTDNNGVKTIANNLTSTVQVFTDSDYQLPYVLGSAHEGCLPPFPADVFMIPQYGYLTLNDGSQAVGRSSFYCLEYFPSQMLRTGNNFQFSYEFENVPFHSSYAHSQSLDRLMNPLIDXYLHYLSKTINGSGQNQQTLKFSVAGPSNMAVQGRNYIPGPSYRQQRVSTTVTQNNNSEFAWPGASSWALNGRNSLMNPGPAMASHKEGEDRFFPLSGSLIFGKQGTGRDNVDADKVMITNEEEIKTTNPVATESYGQVATNHQSAQAQAQTGWVQNQGILPDMVWQDRDVYLQGPIWAKIPHTDGNFHPSPLMGGFGMKHPPPQILIKNTPVPADPPTAFNKDKLNSFITQYSTGQVSVEIEWELQKENSKRWNPEIQYTSNYYKSNNVEFAVNTEGVYSEPRPIGTRYLTRNL

SEQ ID NO: 760 - DNA, 2208 bp, Artificial Sequence
  Description of Artificial Sequence: Synthetic polynucleotide
atggctgccgatggttatcttccagattggctcgaggacaaccttagtgaaggaattcgcgagtggtgggctttgaaacctggagcccctcaacccaaggcaaatcaacaacatcaagacaacgctcgaggtcttgtgcttccgggttacaaataccttggacccggcaacggactcgacaagggggagccggtcaacgcagcagacgcggcggccctcgagcacgacaaggcctacgaccagcagctcaaggccggagacaacccgtacctcaagtacaaccacgccgacgccgagttccaggagcggctcaaagaagatacgtcttttgggggcaacctcgggcgagcagtcttccaggccaaaaagaggcttcttgaacctcttggtctggttgaggaagcggctaagacggctcctggaaagaagaggcctgtagagcagtctcctcaggaaccggactcctccgcgggtattggcaaatcgggtgcacagcccgctaaaaagagactcaatttcggtcagactggcgacacagagtcagtcccagaccctcaaccaatcggagaacctcccgcagccccctcaggtgtgggatctcttacaatggcttcaggtggtggcgcaccagtggcagacaataacgaaggtgccgatggagtgggtagttcctcgggaaattggcattgcgattcccaatggctgggggacagagtcatcaccaccagcacccgaacctgggccctgcccacctacaacaatcacctctacaagcaaatctccaacagcacatctggaggatcttcaaatgacaacgcctacttcggctacagcaccccctgggggtattttgacttcaacagattccactgccacttctcaccacgtgactggcagcgactcatcaacaacaactggggattccggcctaagcgactcaacttcaagctcttcaacattcaggtcaaagaggttacggacaacaatggagtcaagaccatcgccaataaccttaccagcacggtccaggtcttcacggactcagactatcagctcccgtacgtgctcgggtcggctcacgagggctgcctcccgccgttcccagcggacgttttcatgattcctcagtacgggtatctgacgcttaatgatggaagccaggccgtgggtcgttcgtccttttactgcctggaatatttcccgtcgcaaatgctaagaacgggtaacaacttccagttcagctacgagtttgagaacgtacctttccatagcagctacgctcacagccaaagcctggaccgactaatgaatccactcatcgaccaatacttgcactatctctcaaagactattaacggttctggacagaatcaacaaacgctaaaattcagtgtggccggacccagcaacatggctgtccagggaagaaactacatacctggacccagctaccgacaacaacgtgtctcaaccactgtgactcaaaacaacaacagcgaatttgcttggcctggagcttcttcttgggctctcaatggacgtaatagcttgatgaatcctggacctgctatggccagctacaaagaaggagaggacagtttctttcctttgtctggatctttaatttttggcaaacaaggaactggaagagacaacgtggatgcggacaaagtcatgataaccaacgaagaagaaattaaaactactaacccggtagcaacggagtcctatggacaagtggccacaaaccaccagagtgcccaagcacaggcgcagaccggctgggttcaaaaccaaggaatacttccgggtatggtttggcaggacagagatgtgtacctgcaaggacccatttgggccaaaattcctcacacggacggcaactttcacccttctccgctgatgggagggtttggaatgaagcacccgcctcctcagaccctcatcaaaaacacacctgtacctgcggatcctccaacggccttcaacaaggacaagctgaactctttcatcacccagtattctactggccaagtcagcgtggagatcgagtgggagctgcagaaggaaaacagcaagcgctggaacccggagatccagtacacttccaactattacaagtctaataatgttgaatttgctgttaatactgaaggtgtatatagtgaaccccgccccattggcaccagatacctgactcgtaatctg

SEQ ID NO: 761 - protein, 736 aa, Artificial Sequence; identical to SEQ ID NO: 725
  Description of Artificial Sequence: Synthetic polypeptide

SEQ ID NO: 762 - DNA, 2175 bp, Artificial Sequence
  Description of Artificial Sequence: Synthetic polynucleotide
atgtcttttgttgatcaccctccagattggttggaagaagttggtgaaggtcttcgcgagtttttgggccttgaagcgggcccaccgaaaccaaaacccaatcagcagcatcaagatcaagcccgtggtcttgtgctgcctggttataactatctcggacccggaaacggtctcgatcgaggagagcctgtcaacagggcagacgaggtcgcgcgagagcacgacatctcgtacaacgagcagcttgaggcgggagacaacccctacctcaagtacaaccacgcggacgccgagtttcaggagaggctcgccgacgacacatccttcgggggaaacctcggaaaggcagtctttcaggccaagaaaagggttctcgaaccttttggcctggttgaagagggtgctaagacggcccctaccggaaagcggatagacgaccactttccaaaaagaaagaaggcccggaccgaagaggactccaagccttccacctcgtcagacgccgaagctggacccagcggatcccagcagctgcaaatcccagcccaaccagcctcaagtttgggagctgatacaatgtctgcgggaggtggcggcccattgggcgacaataaccaaggtgccgatggagtgggcaatgcctcgggagattggcattgcgattccacgtggatgggggacagagtcgtcaccaagtccacccgaacctgggtgctgcccagctacaacaaccaccagtaccgagagatcaaaagcggctccgtcgacggaagcaacgccaacgcctactttggatacagcaccccctgggggtactttgactttaaccgcttccacagccactggagcccccgagactggcaaagactcatcaacaactactggggcttcagaccccggtccctcagagtcaaaatcttcaacattcaagtcaaagaggtcacggtgcaggactccaccaccaccatcgccaacaacctcacctccaccgtccaagtgtttacggacgacgactaccagctgccctacgtcgtcggcaacgggaccgagggatgcctgccggccttccctccgcaggtctttacgctgccgcagtacggttacgcgacgctgaaccgcgacaacacagaaaatcccaccgagaggagcagcttcttctgcctagagtactttcccagcaagatgctgagaacgggcaacaactttgagtttacctacaactttgaggaggtgcccttccactccagcttcgctcccagtcagaacctcttcaagctggccaacccgctggtggaccagtacttgtaccgcttcgtgagcacaaataacactggcggagtccagttcaacaagaacctggccgggagatacgccaacacctacaaaaactggttcccggggcccatgggccgaacccagggctggaacctgggctccggggtcaaccgcgccagtgtcagcgccttcgccacgaccaataggatggagctcgagggcgcgagttaccaggtgcccccgcagccgaacggcatgaccaacaacctccagggcagcaacacctatgccctggagaacactatgatcttcaacagccagccggcgaacccgggcaccaccgccacgtacctcgagggcaacatgctcatcaccagcgagagcgagacgcagccggtgaaccgcgtggcgtacaacgtcggcgggcagatggccaccaacaaccagagctccaccactgcccccgcgaccggcacgtacaacctccaggaaatcgtgcccggcagcgtgtggatggagagggacgtgtacctccaaggacccatctgggccaagatcccagagacggaggcgcactttcacccctctccggccatgggcggattcggactcaaacacccaccgcccatgatgctcatcaagaacacgcctgtgcccggaaatatcaccagcttctcggacgtgcccgtcagcagcttcatcacccagtacagcaccgggcaggtcaccgtggagatggagtgggagctcaagaaggaaaactccaagaggtggaacccagagatccagtacacaaacaactacaacgacccccagtttgtggactttgccccggacagcaccggggaatacagaaccaccagacctatcggaacccgataccttacccgacccctttaa

SEQ ID NO: 763 - protein, 724 aa, Artificial Sequence
  Description of Artificial Sequence: Synthetic polypeptide
MSFVDHPPDWLEEVGEGLREFLGLEAGPPKPKPNQQHQDQARGLVLPGYNYLGPGNGLDRGEPVNRADEVAREHDISYNEQLEAGDNPYLKYNHADAEFQERLADDTSFGGNLGKAVFQAKKRVLEPFGLVEEGAKTAPTGKRIDDHFPKRKKARTEEDSKPSTSSDAEAGPSGSQQLQIPAQPASSLGADTMSAGGGGPLGDNNQGADGVGNASGDWHCDSTWMGDRVVTKSTRTWVLPSYNNHQYREIKSGSVDGSNANAYFGYSTPWGYFDFNRFHSHWSPRDWQRLINNYWGFRPRSLRVKIFNIQVKEVTVQDSTTTIANNLTSTVQVFTDDDYQLPYVVGNGTEGCLPAFPPQVFTLPQYGYATLNRDNTENPTERSSFFCLEYFPSKMLRTGNNFEFTYNFEEVPFHSSFAPSQNLFKLANPLVDQYLYRFVSTNNTGGVQFNKNLAGRYANTYKNWFPGPMGRTQGWNLGSGVNRASVSAFATTNRMELEGASYQVPPQPNGMTNNLQGSNTYALENTMIFNSQPANPGTTATYLEGNMLITSESETQPVNRVAYNVGGQMATNNQSSTTAPATGTYNLQEIVPGSVWMERDVYLQGPIWAKIPETEAHFHPSPAMGGFGLKHPPPMMLIKNTPVPGNITSFSDVPVSSFITQYSTGQVTVEMEWELKKENSKRWNPEIQYTNNYNDPQFVDFAPDSTGEYRTTRPIGTRYLTRPL

SEQ ID NO: 764 - DNA, 2175 bp, Artificial Sequence
  Description of Artificial Sequence: Synthetic polynucleotide
atgtcttttgttgatcaccctccagattggttggaagaagttggtgaaggtcttcgcgagtttttgggccttgaagcgggcccaccgaaaccaaaacccaatcagcagcatcaagatcaagcccgtggtcttgtgctgcctggttataactatctcggacccggaaacggtctcgatcgaggagagcctgtcaacagggcagacgaggtcgcgcgagagcacgacatctcgtacaacgagcagcttgaggcgggagacaacccctacctcaagtacaaccacgcggacgccgagtttcaggagaagctcgccgacgacacatcctccgggggaaacctcggaaaggcagtctttcaggccaagaaaagggttctcgaaccttttggcctggttgaagagggtgctaagacggcccctaccggaaagcggatagacgaccactttccaaaaagaaagaaggcccggaccgaagaggactccaagccttccacctcgtcagacgccgaagctggacccagcggatcccagcagctgcaaatcccagcccaaccagcctcaagtttgggagctgatacaatgtctgcgggaggtggcggcccattgggcgacaataaccaaggtgccgatggagtgggcaatgcctcgggagattggcattgcgattccacgtggatgggggacagagtcgtcaccaagtccacccgaacctgggtgctgcccagctacaacaaccaccagtaccgagagatcaaaagcggctccgtcgacggaagcaacgccaacgcctactttggatacagcaccccctgggggtactttgactttaaccgcttccacagccactggagcccccgagactggcaaagactcatcaacaactactggggcttcagaccccggtccctcagagtcaaaatcttcaacattcaagtcaaagaggtcacggtgcaggactccaccaccaccatcgccaacaacctcacctccaccgtccaagtgtttacggacgacgactaccagctgccctacgtcgtcggcaacgggaccgagggatgcctgccggccttccctccgcaggtctttacgctgccgcagtacggttacgcgacgctgaaccgcgacaacacagaaaatcccaccgagaggagcagcttcttctgcctagagtactttcccagcaagatgctgagaacgggcaacaactttgagtttacctacaactttgaggaggtgcccttccactccagcttcgctcccagtcagaacctcttcaagctggccaacccgctagtggaccagtacttgtaccgcttcgtgagcacaaataacactggcggagtccagttcaacaagaacctggccgggagatacgccaacacctacaaaaactggttcccggggcccatgggccgaacccagggctggaacctgggctccggggtcaaccgcgccagtgtcagcgccttcgccacgaccaataggatggagctcgagggcgcgagttaccaggtgcccccgcagccgaacggcatgaccaacaacctccagggcagcaacacctatgccctggagaacactatgatcttcaacagccagccggcgaacccgggcaccaccgccacgtacctcgagggcaacatgctcatcaccagcgagagcgagacgcagccggtgaaccgcgtggcgtacaacgtcggcgggcagatggccaccaacaaccagagctccaccactgcccccgcgaccggcacgtacaacctccaggaaatcgtgcccggcagcgtgtggatggagagggacgtgtacctccaaggacccatctgggccaagatcccagagacgggggcgcactttcacccctctccggccatgggcggattcggactcaaacacccaccgcccatgatgctcatcaagaacacgcctgtgcccggaaatatcaccagcttctcggacgtgcccgtcagcagcttcatcacccagtacagcaccgggcaggtcaccgtggagatggagtgggagctcaagaaggaaaactccaagaggtggaacccagagatccagtacacaaacaactacaacgacccccagtttgtggactttgccccggacagcaccggggaatacagaaccaccagacctatcggaacccgataccttacccgacccctttaa

SEQ ID NO: 765 - protein, 724 aa, Artificial Sequence
  Description of Artificial Sequence: Synthetic polypeptide
MSFVDHPPDWLEEVGEGLREFLGLEAGPPKPKPNQQHQDQARGLVLPGYNYLGPGNGLDRGEPVNRADEVAREHDISYNEQLEAGDNPYLKYNHADAEFQEKLADDTSSGGNLGKAVFQAKKRVLEPFGLVEEGAKTAPTGKRIDDHFPKRKKARTEEDSKPSTSSDAEAGPSGSQQLQIPAQPASSLGADTMSAGGGGPLGDNNQGADGVGNASGDWHCDSTWMGDRVVTKSTRTWVLPSYNNHQYREIKSGSVDGSNANAYFGYSTPWGYFDFNRFHSHWSPRDWQRLINNYWGFRPRSLRVKIFNIQVKEVTVQDSTTTIANNLTSTVQVFTDDDYQLPYVVGNGTEGCLPAFPPQVFTLPQYGYATLNRDNTENPTERSSFFCLEYFPSKMLRTGNNFEFTYNFEEVPFHSSFAPSQNLFKLANPLVDQYLYRFVSTNNTGGVQFNKNLAGRYANTYKNWFPGPMGRTQGWNLGSGVNRASVSAFATTNRMELEGASYQVPPQPNGMTNNLQGSNTYALENTMIFNSQPANPGTTATYLEGNMLITSESETQPVNRVAYNVGGQMATNNQSSTTAPATGTYNLQEIVPGSVWMERDVYLQGPIWAKIPETGAHFHPSPAMGGFGLKHPPPMMLIKNTPVPGNITSFSDVPVSSFITQYSTGQVTVEMEWELKKENSKRWNPEIQYTNNYNDPQFVDFAPDSTGEYRTTRPIGTRYLTRPL

SEQ ID NO: 766 - DNA, 2175 bp, Artificial Sequence
  Description of Artificial Sequence: Synthetic polynucleotide
atgtcttttgttgatcaccctccagattggttggaagaagttggtgaaggtcttcgcgagtttttgggccttgaagcgggcccaccgaaaccaaaacccaatcagcagcatcaagatcaagcccgtggtcttgtgctgcctggttataactatctcggacccggaaacggtctcgatcgaggagagcctgtcaacagggcagacgaggtcgcgcgagagcacgacatctcgtacaacgagcagcttgaggcgggagacaacccctacctcaagtacaaccacgcggacgccgagtttcaggagaagctcgccgacgacacatccttcgggggaaacctcggaaaggcagtctttcaggccaagaaaagggttctcgaaccttttggcctggttgaagagggtgctaagacggcccctaccggaaagcggatagacgaccactttccaaaaagaaagaaggcccggaccgaagaggactccaagccttccacctcgtcagacgccgaagctggacccagcggatcccagcagctgcaaatcccagcccaaccagcctcaagtttgggagctgatacaatgtctgcgggaggtggcggcccattgggcgacaataaccaaggtgccgatggagtgggcaatgcctcgggagattggcattgcgattccacgtggatgggggacagagtcgtcaccaagtccacccgaacctgggtgctgcccagctacaacaaccaccagtaccgagagatcaaaagcggctccgtcgacggaagcaacgccaacgcctactttggatacagcaccccctgggggtactttgactttaaccgcttccacagccactggagcccccgagactggcaaagactcatcaacaactactggggcttcagaccccggtccctcagagtcaaaatcttcaacattcaagtcaaagaggtcacggtgcaggactccaccaccaccatcgccaacaacctcacctccaccgtccaagtgtttacggacgacgactaccagctgccctacgtcgtcggcaacgggaccgagggatgcctgccggccttccctccgcaggtctttacgctgccgcagtacggttacgcgacactgaaccgcgacaacacagaaaatcccaccgagaggagcagcttcttctgcctagagtactttcccagcaagatgctgagaacgggcaacaactttgagtttacctacaactttgaggaggtgcccttccactccagcttcgctcccagtcagaacctcttcaagctggccaacccgctggtggaccagtacttgtaccgcttcgtgagcacaaataacactggcggagtccagttcaacaagaacctggccgggagatacgccaacacctacaaaaactggttcccggggcccatgggccgaacccagggctggaacctgggctccggggtcaaccgcgccagtgtcagcgccttcgccacgaccaataggatggagctcgagggcgcgagttaccaggtgcccccgcagccgaacggcatgaccaacaacctccagggcagcaacacctatgccctggagaacactatgatcttcaacagccagccggcgaacccgggcaccaccgccacgtacctcgagggcaacatgctcatcaccagcgagagcgagacgcagccggtgaaccgcgtggcgtacaacgtcggcgggcagatggccaccaacaaccagagctccaccactgcccccgcgaccggcacgtacaacctccaggaaatcgtgcccggcagcgtgtggatggagagggacgtgtacctccaaggacccatctgggccaagatcccagagacgggggcgcactttcacccctctccggccatgggcggattcggactcaaacacccaccgcccatgatgctcatcaagagcacgcctgtgcccggaaatatcaccagcttctcggacgtgcccgtcagcagcttcatcacccagtacagcaccgggcaggtcaccgtggagatggagtgggagctcaagaaggaaaactccaagaggtggaacccagagatccagtacacaaacaactacaacgacccccagtttgtggactttgccccggacagcaccggggaatacagaaccaccagacctatcggaacccgataccttacccgacccctttaa

SEQ ID NO: 767 - protein, 724 aa, Artificial Sequence
  Description of Artificial Sequence: Synthetic polypeptide
MSFVDHPPDWLEEVGEGLREFLGLEAGPPKPKPNQQHQDQARGLVLPGYNYLGPGNGLDRGEPVNRADEVAREHDISYNEQLEAGDNPYLKYNHADAEFQEKLADDTSFGGNLGKAVFQAKKRVLEPFGLVEEGAKTAPTGKRIDDHFPKRKKARTEEDSKPSTSSDAEAGPSGSQQLQIPAQPASSLGADTMSAGGGGPLGDNNQGADGVGNASGDWHCDSTWMGDRVVTKSTRTWVLPSYNNHQYREIKSGSVDGSNANAYFGYSTPWGYFDFNRFHSHWSPRDWQRLINNYWGFRPRSLRVKIFNIQVKEVTVQDSTTTIANNLTSTVQVFTDDDYQLPYVVGNGTEGCLPAFPPQVFTLPQYGYATLNRDNTENPTERSSFFCLEYFPSKMLRTGNNFEFTYNFEEVPFHSSFAPSQNLFKLANPLVDQYLYRFVSTNNTGGVQFNKNLAGRYANTYKNWFPGPMGRTQGWNLGSGVNRASVSAFATTNRMELEGASYQVPPQPNGMTNNLQGSNTYALENTMIFNSQPANPGTTATYLEGNMLITSESETQPVNRVAYNVGGQMATNNQSSTTAPATGTYNLQEIVPGSVWMERDVYLQGPIWAKIPETGAHFHPSPAMGGFGLKHPPPMMLIKSTPVPGNITSFSDVPVSSFITQYSTGQVTVEMEWELKKENSKRWNPEIQYTNNYNDPQFVDFAPDSTGEYRTTRPIGTRYLTRPL

SEQ ID NO: 768 - DNA, 2205 bp, Artificial Sequence
  Description of Artificial Sequence: Synthetic polynucleotide
atgactgacggttaccttccagattggctagaggacaacctctctgaaggcgttcgagagtggtgggcgctgcaacctggagcccctaaacccaaggcaaatcaacaacatcaggacaacgctcggggtcttgtgcttccgggttacaaatacctcggacccggcaacggactcgacaagggggaacccgtcaacgcagcggacgcggcagccctcgagcacgacaaggcctacgaccagcagctcaaggccggtgacaacccctacctcaagtacaaccacgccgacgcggagttccagcagcggcttcagggcgacacatcgtttgggggcaacctcggcagagcagtcttccaggccaaaaagagggttcttgaacctcttggtctggttgagcaagcgggtgagacggctcctggaaagaagagaccgttgattgaatccccccagcagcccgactcctccacgggtatcggcaaaaaaggcaagcagccggctaaaaagaagctcgttttcgaagacggaactggagcaggcgacggaccccctgagggatcaacttccggagccatgtctgatgacagtgagatgcgtgcagcagctggcggagctgcagtcgagggcggacaaggtgccgatggagtgggtaatgcctcgggtgattggcattgcgattccacctggtctgagggccacgtcacgaccaccagcaccagaacctgggtcttgcccacctacaacaaccacctctacaagcgactcggagagagcctgcagtccaacacctacaacggattccccaccccctggggatactttgacttcaaccgcttccactgccacttctcaccacgtgactggcagcgactcatcaacaacaactggggcatgcgacccaaagccatgcgggtcaaaatcttcaacatccaggtcaaggaggtcacgacgtcgaacggcgagacaacggcggctaataaccttaccagcacggttcagatctttgcggactcgtcgtacgaactgccgtacgtgatggatgcgggtcaagagggcagcctgcctccttttcccaacgacgtctttatggtgccccagtacggctactgtggactggtgaccggcaacacttcgcagcaacagactgacagaaatgccttctactgcctggagtactttccttcgcagatgctgcggactggcaacaactttgaaattacgtacagttttgagaaggtgcctttccactcgatgtacgcgcacagccagagcctggaccggctgatgaaccctctcatcgaccagtacctgtggggactgcaatcgaccaccaccggaaccaccctgaatgccgggactgccaccaccaactttaccaagctgcggcctaccaacttttccaactttaaaaagaactggctgcccgggccttcaatcaagcagcagggcttctcaaagactgccaatcaaaactacaagatccctgccaccgggtcagacagtctcatcaaatacgagacgcacagcactctggacggaagatggagtgccctgacccccggacctccaatggccacggctggacctgcggacagcaagttcagcaacagccagctcatctttgcggggcctaaacagaacggcaacacggccaccgtacccgggactctgatcttcacctctgaggaggagctggcagccaccaacgccaccgatacggacatgtggggcaacctacctggcggtgaccagagcaacagcaacctgccgaccgtggacagactgacagccttgggagccgtgcctggaatggtctggcaaaacagagacatttactaccagggtcccatttgggccaagattcctcataccgatggacactttcacccctcaccgctgattggtgggtttgggctgaaacacccgcctcctcaaatttttatcaagaacaccccggtacctgcgaatcctgcgacgaccttcagctctactccggtaaactccttcattactcagtacagcactggccaggtgtcggtgcagattgactgggagatccagaaggagcggtccaaacgctggaaccccgaggtccagtttacctccaactacggacagcaaaactctctgttgtgggctcccgatgcggctgggaaatacactgagcctagggctatcggtacccgctacctcacccaccacctgtaa

SEQ ID NO: 769 - protein, 734 aa, Artificial Sequence
  Description of Artificial Sequence: Synthetic polypeptide
MTDGYLPDWLEDNLSEGVREWWALQPGAPKPKANQQHQDNARGLVLPGYKYLGPGNGLDKGEPVNAADAAALEHDKAYDQQLKAGDNPYLKYNHADAEFQQRLQGDTSFGGNLGRAVFQAKKRVLEPLGLVEQAGETAPGKKRPLIESPQQPDSSTGIGKKGKQPAKKKLVFEDGTGAGDGPPEGSTSGAMSDDSEMRAAAGGAAVEGGQGADGVGNASGDWHCDSTWSEGHVTTTSTRTWVLPTYNNHLYKRLGESLQSNTYNGFPTPWGYFDFNRFHCHFSPRDWQRLINNNWGMRPKAMRVKIFNIQVKEVTTSNGETTAANNLTSTVQIFADSSYELPYVMDAGQEGSLPPFPNDVFMVPQYGYCGLVTGNTSQQQTDRNAFYCLEYFPSQMLRTGNNFEITYSFEKVPFHSMYAHSQSLDRLMNPLIDQYLWGLQSTTTGTTLNAGTATTNFTKLRPTNFSNFKKNWLPGPSIKQQGFSKTANQNYKIPATGSDSLIKYETHSTLDGRWSALTPGPPMATAGPADSKFSNSQLIFAGPKQNGNTATVPGTLIFTSEEELAATNATDTDMWGNLPGGDQSNSNLPTVDRLTALGAVPGMVWQNRDIYYQGPIWAKIPHTDGHFHPSPLIGGFGLKHPPPQIFIKNTPVPANPATTFSSTPVNSFITQYSTGQVSVQIDWEIQKERSKRWNPEVQFTSNYGQQNSLLWAPDAAGKYTEPRAIGTRYLTHHL

SEQ ID NO: 770 - DNA, 2205 bp, Artificial Sequence
  Description of Artificial Sequence: Synthetic polynucleotide
atgactgacggttaccttccagattggctagaggacaacctctctgaaggcgttcgagagtggtgggcgctgcaacctggagcccctaaacccaaggcaaatcaacaacatcaggacaacgctcggggtcttgtgcttccgggttacaaatacctcggacccggcaacggactcgacaagggggaacccgtcaacgcagcggacgcggcagccctcgagcacgacaaggcctacgaccagcagctcaaggccggtgacaacccctacctcaagtacaaccacgccgacgcggagttccagcagcggcttcagggcgacacatcgtttgggggcaacctcggcagagcagtcttccaggccaaaaagagggttcttgaacctcttggtctggttgagcaagcgggtgagacggctcctggaaagaagagaccgttgattgaatccccccagcagcccgactcctccacgggtatcggcaaaaaaggcaagcagccggctaaaaagaagctcgttttcgaagacgaaactggagcaggcgacggaccccctgagggatcaacttccggagccatgtctgatgacagtgagatgcgtgcagcagctggcggagctgcagtcgagggcggacaaggtgccgatggagtgggtaatgcctcgggtgattggcattgcgattccacctggtctgagggccacgtcacgaccaccagcaccagaacctgggtcttgcccacctacaacaaccacctctacaagcgactcggagagagcctgcagtccaacacctacaacggattctccaccccctggggatactttgacttcaaccgcttccactgccacttctcaccacgtgactggcagcgactcatcaacaacaactggggcatgcgacccaaagccatgcgggtcaaaatcttcaacatccaggtcaaggaggtcacgacgtcgaacggcgagacaacggtggctaataaccttaccagcacggttcagatctttgcggactcgtcgtacgaactgccgtacgtgatggatgcgggtcaagagggcagcctgcctccttttcccaacgacgtctttatggtgccccagtacggctaccgtggactggtgaccggcaacacttcgcagcaacagactgacagaaatgccttctactgcctggagtactttccttcgcagatgctgcggactggcaacaactttgaaattacgtacagttttgagaaggtgcctttccactcgatgtacgcgcacagccagagcctggaccggctgatgaaccctctcatcgaccagtacctgtggggactgcaatcgaccaccaccggaaccaccctgaatgccgggactgccaccaccaactttaccaagctgcggcctaccaacttttccaactttaaaaagaactggctgcccgggccttcaatcaagcagcagggcttctcaaagactgccaatcaaaactacaagatccctgccaccgggtcagacagtctcatcaaatacgagacgcacagcactctggacggaagatggagtgccctgacccccggacctccaatggccacggctggacctgcggacagcaagttcagcaacagccagctcatctttgcggggcctaaacagaacggcaacacggccaccgtacccgggactctgatcttcacctctgaggaggagctggcagccaccaacgccaccgatacggacatgtggggcaacctacctggcggtgaccagagcaacagcaacctgccgaccgtggacagactgacagccttgggagccgtgcctggaatggtctggcaaaacagagacatttactaccagggtcccatttgggccaagattcctcataccgatggacactttcacccctcaccgctgattggtgggtttgggctgaaacacccgcctcctcaaatttttatcaagaacaccccggtacctgcgaatcctgcgacgaccttcagctctactccggtaaactccttcattactcagtacagcactggccaggtgtcggtgcagattgactgggagatccagaaggagcggtccaaacgctggaaccccgaggtccagtttacctccaactacggacagcaaaactctctgttgtgggctcccgatgcggctgggaaatacactgagcctagggctatcggtacccgctacctcacccaccacctgtaa

SEQ ID NO: 771 - protein, 734 aa, Artificial Sequence
  Description of Artificial Sequence: Synthetic polypeptide
MTDGYLPDWLEDNLSEGVREWWALQPGAPKPKANQQHQDNARGLVLPGYKYLGPGNGLDKGEPVNAADAAALEHDKAYDQQLKAGDNPYLKYNHADAEFQQRLQGDTSFGGNLGRAVFQAKKRVLEPLGLVEQAGETAPGKKRPLIESPQQPDSSTGIGKKGKQPAKKKLVFEDETGAGDGPPEGSTSGAMSDDSEMRAAAGGAAVEGGQGADGVGNASGDWHCDSTWSEGHVTTTSTRTWVLPTYNNHLYKRLGESLQSNTYNGFSTPWGYFDFNRFHCHFSPRDWQRLINNNWGMRPKAMRVKIFNIQVKEVTTSNGETTVANNLTSTVQIFADSSYELPYVMDAGQEGSLPPFPNDVFMVPQYGYRGLVTGNTSQQQTDRNAFYCLEYFPSQMLRTGNNFEITYSFEKVPFHSMYAHSQSLDRLMNPLIDQYLWGLQSTTTGTTLNAGTATTNFTKLRPTNFSNFKKNWLPGPSIKQQGFSKTANQNYKIPATGSDSLIKYETHSTLDGRWSALTPGPPMATAGPADSKFSNSQLIFAGPKQNGNTATVPGTLIFTSEEELAATNATDTDMWGNLPGGDQSNSNLPTVDRLTALGAVPGMVWQNRDIYYQGPIWAKIPHTDGHFHPSPLIGGFGLKHPPPQIFIKNTPVPANPATTFSSTPVNSFITQYSTGQVSVQIDWEIQKERSKRWNPEVQFTSNYGQQNSLLWAPDAAGKYTEPRAIGTRYLTHHL

SEQ ID NO: 772 - DNA, 2205 bp, Artificial Sequence
  Description of Artificial Sequence: Synthetic polynucleotide
atgactgacggttaccttccagattggctagaggacaacctctctgaaggcgttcgagagtggtgggcgctgcaacctggagcccctaaacccaaggcaaatcaacaacatcaggacaacgctcggggtcttgtgcttcagggttacaaatacctcggacccggcaacggactcgacaagggggaacccgtcaacgcagcggacgcggcagccctcgagcacgacaaggcctacgaccagcagctcaaggccggtgacaacccctacctcaagtacaaccacgccgacgcggagttccagcagcggcttcagggcgacacatcgtttgggggcaacctcggcagagcagtcttccaggccaaaaagagggttcttgaaccccttggtctggttgagcaagcgggtgagacggctcctggaaagaagagaccgttgattgaatccccccagcagcccgactcctccacgggtatcggcaaaaaaggcaagcagccggctaaaaagaagctcgttttcgaagacgaaactggagcaggcgacggaccccctgagggatcaacttccggagccatgtctgatgacagtgagatgcgtgcagcagctggcggagctgcagtcgagggcggacaaggtgccgatggagtgggtaatgcctcgggtgattggcattgcgattccacccggtctgagggccacgtcacgaccaccagcaccagaacctgggtcttgcccacctacaacaaccacctctacaagcgactcggagagagcctgcagtccaacacctacaacggattctccaccccctggggatactttgacttcaaccgcttccactgccacttctcaccacgtgactggcagcgactcatcaacaataactggggcatgcgacccaaagccatgcgggtcaaaatcttcaacatccaggtcaaggaggtcacgacgtcgaacggcgagacaacggtggctaataaccttaccagcacggttcagatctttgcggactcgtcgtacgaactgccgtacgtgatggatgcgggtcaagagggcagcctgcctccttttcccaacgacgtctttatggtgccccagtacggctactgtggactggtgaccggcaacacttcgcagcaacagactgacagaaatgccttctactgcctggagtactttccttcgcagatgctgcggactggcaacaactttgaaattacgtacagttttgagaaggtgcctttccactcgatgtacgcgcacagccagagcctggaccggctgatgaaccctctcatcgaccagtacctgtggggactgcaatcgaccaccaccggaaccaccctgaatgccgggactgccaccaccaactttaccaagctgcggcctaccaacttttccaactttaaaaagaactggctgcccgggccttcaatcaagcagcagggcttctcaaagactgccaatcaaaactacaagatccctgccaccgggtcagacagtctcatcaaatacgagacgcacagcactctggacggaagatggagtgcccggacccccggacctccaatggccacggctggacctgcggacagcaagttcagcaacagccagctcatctttgcggggcctaaacagaacggcaacacggccaccgtacccgggactctgatcttcacctctgaggaggagctggcagccaccaacgccaccgatacggacatgtggggcaacctacctggcggtgaccagagcaacagcaacctgccgaccgtggacagactgacagccttgggagccgtgcctggaatggtctggcaaaacagagacatttactaccagggtcccatttgggccaagattcctcataccgatggacactttcacccctcaccgctgattggtgggtttgggctgaaacacccgcctcctcaaatttttatcaagaacaccccggtacctgcgaatcctgcgacgaccttcagctctactccggtaaactccttcattactcagtacagcactggccaggtgtcggtgcagattgactgggagatccagaaggagcggtccaaacgctggaaccccgaggtccagtttacctccaactacggacagcaaaactctctgttgtgggctcccgatgcggctgggaaatacactgagcctagggctatcggtacccgctacctcacccaccacctgtaa

SEQ ID NO: 773 - protein, 734 aa, Artificial Sequence
  Description of Artificial Sequence: Synthetic polypeptide
MTDGYLPDWLEDNLSEGVREWWALQPGAPKPKANQQHQDNARGLVLQGYKYLGPGNGLDKGEPVNAADAAALEHDKAYDQQLKAGDNPYLKYNHADAEFQQRLQGDTSFGGNLGRAVFQAKKRVLEPLGLVEQAGETAPGKKRPLIESPQQPDSSTGIGKKGKQPAKKKLVFEDETGAGDGPPEGSTSGAMSDDSEMRAAAGGAAVEGGQGADGVGNASGDWHCDSTRSEGHVTTTSTRTWVLPTYNNHLYKRLGESLQSNTYNGFSTPWGYFDFNRFHCHFSPRDWQRLINNNWGMRPKAMRVKIFNIQVKEVTTSNGETTVANNLTSTVQIFADSSYELPYVMDAGQEGSLPPFPNDVFMVPQYGYCGLVTGNTSQQQTDRNAFYCLEYFPSQMLRTGNNFEITYSFEKVPFHSMYAHSQSLDRLMNPLIDQYLWGLQSTTTGTTLNAGTATTNFTKLRPTNFSNFKKNWLPGPSIKQQGFSKTANQNYKIPATGSDSLIKYETHSTLDGRWSARTPGPPMATAGPADSKFSNSQLIFAGPKQNGNTATVPGTLIFTSEEELAATNATDTDMWGNLPGGDQSNSNLPTVDRLTALGAVPGMVWQNRDIYYQGPIWAKIPHTDGHFHPSPLIGGFGLKHPPPQIFIKNTPVPANPATTFSSTPVNSFITQYSTGQVSVQIDWEIQKERSKRWNPEVQFTSNYGQQNSLLWAPDAAGKYTEPRAIGTRYLTHHL

SEQ ID NO: 774 - DNA, 2175 bp, Artificial Sequence
  Description of Artificial Sequence: Synthetic polynucleotide
atgtcttttgttgatcaccctccagattggttggaagaagttggtgaaggtcttcgcgagtttttgggccctgaagcgggcccaccgaaaccaaaacccaatcagcagcatcaagatcaagcccgtggtcttgtgctgcctggttataactatctcggacccggaaacggtctcgatcgaggagagcctgtcaacagggcagacgaggtcgcgcgagagcacgacatctcgtacaacgagcagcttgaggcgggagacaacccctacctcaagtacaaccacgcggacgccgagtttcaggagaagctcgccgacgacacatccttcgggggaaacctcggaaaggcagtctttcaggccaagaaaagggttctcgaaccttttggcctggttgaagagggtgctaagacggcccctaccggaaagcggatagacgaccactttccaaaaagaaagaaggtccggaccgaagaggactccaagccttccacctcgtcagacgccgaagctggacccagcggatcccagcagctgcaaatcccagcccaaccagcctcaagtttgggagctgatacaatgtctgcgggaggtggcggcccattgggcgacaataaccaaggtgccgatggagtgggcaatgcctcgggagattggcattgcgattccacgtggatgggggacagagtcgtcaccaagtccacccgaacctgggtgccgcccagctacaacaaccaccagtaccgagagatcaaaagcggctccgtcgacggaagcaacgccaacgcctactttggatacagcaccccctgggggtactttgactttaaccgcttccacagccactggagcccccgagactggcaaagactcatcaacaactactggggcttcagaccccggtccctcagagtcaaaatcttcaacattcaagtcaaagaggtcacggtgcaggactccaccaccaccatcgccaacaacctcacctccaccgtccaagtgtttacggacgacgactaccagctgccctacgtcgtcggcaacgggaccgagggatgcctgccggccttccctccgcaggtctttacgctgccgcagtacggttacgcgacgctgaaccgcgacaacacagaaaatcccaccgagaggagcagcttcttctgcctagagtactttcccagcaagatgctgagaacgggcaacaactttgagtttacctacaactttgaggaggtgcccttccactccagcttcgctcccagtcagaacctcttcaagctggccaacccgctggtggaccagtacttgtaccgcttcgtgagcacaaataacactggcggagtccagttcaacaagaacctggccgggagatacgccaacacctacaaaaactggttcccggggcccatgggccgaacccagggctggaacctgggctccggggtcaaccgcgccagtgtcagcgccttcgccacgaccaataggatggagctcgagggcgcgagttaccaggtgcccccgcagccgaacggcatgaccaacaacctccagggcagcaacacctatgccctggagaacactatgatcttcaacagccagccggcgaacccgggcaccaccgccacgtacctcgagggcaacatgctcatcaccagcgagagcgagacgcagccggtgaaccgcgtggcgtgcaacgtcggcgggcagatggccaccaacaaccagagctccaccactgcccccgcgaccggcacgtacaacctccaggaaatcgtgcccggcagcgtgtggatggagagggacgtgtacctccaaggacccatctgggccaagatcccagagacgggggcgcactttcacccctctccggccatgggcggattcggactcaaacacccaccgcccatgatgctcatcaagaacacgcctgtgcccggaaatatcaccagcttctcggacgtgcccgtcagcagcttcatcacccagtacagcaccgggcaggtcaccgtggagatggagtgggagctcaagaaggaaaactccaagaggtggaacccagagatccagtacacaaacaactacaacgacccccagtttgtggactttgccccggacagcaccggggaatacagaaccaccagacctattggaacccgataccttacccgacccctttaa

SEQ ID NO: 775 - protein, 724 aa, Artificial Sequence
  Description of Artificial Sequence: Synthetic polypeptide
MSFVDHPPDWLEEVGEGLREFLGPEAGPPKPKPNQQHQDQARGLVLPGYNYLGPGNGLDRGEPVNRADEVAREHDISYNEQLEAGDNPYLKYNHADAEFQEKLADDTSFGGNLGKAVFQAKKRVLEPFGLVEEGAKTAPTGKRIDDHFPKRKKVRTEEDSKPSTSSDAEAGPSGSQQLQIPAQPASSLGADTMSAGGGGPLGDNNQGADGVGNASGDWHCDSTWMGDRVVTKSTRTWVPPSYNNHQYREIKSGSVDGSNANAYFGYSTPWGYFDFNRFHSHWSPRDWQRLINNYWGFRPRSLRVKIFNIQVKEVTVQDSTTTIANNLTSTVQVFTDDDYQLPYVVGNGTEGCLPAFPPQVFTLPQYGYATLNRDNTENPTERSSFFCLEYFPSKMLRTGNNFEFTYNFEEVPFHSSFAPSQNLFKLANPLVDQYLYRFVSTNNTGGVQFNKNLAGRYANTYKNWFPGPMGRTQGWNLGSGVNRASVSAFATTNRMELEGASYQVPPQPNGMTNNLQGSNTYALENTMIFNSQPANPGTTATYLEGNMLITSESETQPVNRVACNVGGQMATNNQSSTTAPATGTYNLQEIVPGSVWMERDVYLQGPIWAKIPETGAHFHPSPAMGGFGLKHPPPMMLIKNTPVPGNITSFSDVPVSSFITQYSTGQVTVEMEWELKKENSKRWNPEIQYTNNYNDPQFVDFAPDSTGEYRTTRPIGTRYLTRPL

SEQ ID NO: 776 - DNA, 2175 bp, Artificial Sequence
  Description of Artificial Sequence: Synthetic polynucleotide
atgtcttttgttgatcaccctccagattggttggaagaagttggtgaaggtcttcgcgagtttttgggccttgaagcgggcccaccgaaaccaaaacccaatcagcagcatcaagatcaagcccgtggtcttgtgctgcctggttataactatctcggacccggaaacggtctcgatcgaggagagcctgtcaacagggcagacgaggtcgcgcgagagcacgacatctcgtacaacgagcagcttgaggcgggagacaacccctacctcaagtacaaccacgcggacgccgagtttcaggagaagctcgccgacgacacatccttcgggggaaacctcggaaaggcagtctttcaggccaagaaaagggttctcgaaccttttggcctggttgaagagggtgctaagacggcccctaccggaaagcggatagacgaccactttccaaaaagaaagaaggcccggaccgaagaggactccaagccttccacctcgtcagacgccgaagctggacccagcggatcccagcagctgcaaatcccagcccaaccagcctcaagtttgggagctgatacaatgtctgcgggaggtggcggcccattgggcgacaataaccaaggtgccgatggagtgggcaatgcctcgggagattggcattgcgattccacgtggatgggggacagagtcgtcaccaagtccacccgaacctgggtgctgcccagctacaacaaccaccagtaccgagagatcaaaagcggctccgtcgacggaagcaacgccaacgcctactttggatacagcaccccctgggggtactttgactttaaccgcttccacagccactggagcccccgagactggcaaagactcatcaacaactactggggcttcagaccccggtccctcagagtcaaaatcttcaacattcaagtcaaagaggtcacggtgcaggactccaccaccaccatcgccaacaacctcacctccaccgtccaagtgtttacggacgacgactaccagctgccctacgtcgtcggcaacgggaccgagggatgcctgccggccttccctccgcaggtctttacgctgccgcagtacggttacgcgacgctgaaccgcgacaacaccgaaaatcccaccgagaggagcagcttcttctgcctagagtactttcccagcaagatgctgagaacgggcaacaactttgagtttacctacaactttgaggaggtgcccttccactccagcttcgctcccagtcagaacctcttcaagctggccaacccgctggtggaccagtacttgtaccgcttcgtgagcacaaataacactggcggagtccagttcaacaagaacctggccgggagatacgccaacacctacaaaaactggttcccggggcccatgggccgaacccagggctggaacctgggctccggggtcaaccgcgccagtgtcagcgccttcgccacgaccaataggatggagctcgagggcgcgagttaccaggtgcccccgcagccgaacggcatgaccaacaacctccagggcagcaacacctatgccctggagaacactatgatcttcaacagccagccggcgaacccgggcaccaccgccacgtacctcgagggcaacatgctcatcaccagcgagagcgagacgcagccggtgaaccgcgtggcgtacaacgtcggcgggcagatggccaccaacaaccagagctccaccactgcccccgcgaccggcgcgtacaacctccaggaaatcgtgcccggcagcgtgtggatggagagggacgtgtacctccaaggacccatctgggccaagatcccagagacgggggcgcactttcacccctctccggccatgggcggattcggactcaaacacccaccgcccatgatgctcatcaagaacacgcctgtgcccggaaatatcaccagcttctcggacgtgcccgtcagcagcttcatcacccagtacagcaccgggcaggtcaccgtggagatggagtgggagctcaagaaggaaaactccaagaggtggaacccagagatccagtacacaaacaactacaacgacccccagtttgtggactttgccccggacagcaccggggaatacagaaccaccagacctatcggaacccgataccttacccgacccctttaa

SEQ ID NO: 777 - protein, 724 aa, Artificial Sequence
  Description of Artificial Sequence: Synthetic polypeptide
MSFVDHPPDWLEEVGEGLREFLGLEAGPPKPKPNQQHQDQARGLVLPGYNYLGPGNGLDRGEPVNRADEVAREHDISYNEQLEAGDNPYLKYNHADAEFQEKLADDTSFGGNLGKAVFQAKKRVLEPFGLVEEGAKTAPTGKRIDDHFPKRKKARTEEDSKPSTSSDAEAGPSGSQQLQIPAQPASSLGADTMSAGGGGPLGDNNQGADGVGNASGDWHCDSTWMGDRVVTKSTRTWVLPSYNNHQYREIKSGSVDGSNANAYFGYSTPWGYFDFNRFHSHWSPRDWQRLINNYWGFRPRSLRVKIFNIQVKEVTVQDSTTTIANNLTSTVQVFTDDDYQLPYVVGNGTEGCLPAFPPQVFTLPQYGYATLNRDNTENPTERSSFFCLEYFPSKMLRTGNNFEFTYNFEEVPFHSSFAPSQNLFKLANPLVDQYLYRFVSTNNTGGVQFNKNLAGRYANTYKNWFPGPMGRTQGWNLGSGVNRASVSAFATTNRMELEGASYQVPPQPNGMTNNLQGSNTYALENTMIFNSQPANPGTTATYLEGNMLITSESETQPVNRVAYNVGGQMATNNQSSTTAPATGAYNLQEIVPGSVWMERDVYLQGPIWAKIPETGAHFHPSPAMGGFGLKHPPPMMLIKNTPVPGNITSFSDVPVSSFITQYSTGQVTVEMEWELKKENSKRWNPEIQYTNNYNDPQFVDFAPDSTGEYRTTRPIGTRYLTRPL

SEQ ID NO: 778 - DNA, 2175 bp, Artificial Sequence
  Description of Artificial Sequence: Synthetic polynucleotide
atgtcttttgttgatcaccctccagattggttggaagaagttggtgaaggtcttcgcgagtttttgggccttgaagcgggcccaccgaaaccaaaacccaatcagcagcatcaagatcaagcccgtggtcttgtgctgcctggttataactatctcggacccggaaacggtctcgatcgaggagagcctgtcaacagggcagacggggtcgcgcgagagcacgacatctcgtacaacgagcagcttgaggcgggagacaacccctacctcaagtacaaccacgcggacgccgagtttcaggagaagctcgccgacgacacatccttcgggggaaacctcggaaaggcagtctttcaggccaagaaaagggttctcgaaccttttggcctggttgaagagggtgctaagacggcccctaccggaaagcggatagacgaccactttccaaaaagaaagaaggcccggaccgaagaggactccaagccttccacctcgtcagacgccgaagctggacccagcggatcccagcagctgcaaatcccagcccaaccagcctcaagtttgggagctgatacaatgtctgcgggaggtggcggcccattgggcgacaataaccaaggtgccgatggagtgggcaatgcctcgggagattggcattgcgattccacgtggatgggggacagagtcgtcaccaagtccacccgaacctgggtgctgcccagctacaacaaccaccagtaccgagagatcaaaagcggctccgtcgacggaagcaacgccaacgcctactttggatacagcaccccctgggggtactttgactttaaccgcttccacagccactggagcccccgagactggcaaagactcatcaacaactactggggcttcagaccccggtccctcagagtcaaaatcttcaacattcaagtcaaagaggtcacggtgcaggactccaccaccaccatcgccaacaacctcacctccaccgtccaagcgtttacggacgacgactaccagctgccctacgtcgtcggcaacgggaccgagggatgcctgccggccttccctccgcaggtctttacgctgccgcagtacggttacgcgacgctgaaccgcgacaacacagaaaatcccaccgagaggagcagcttcttctgcctagagtactttcccagcaagatgctgagaacgggcaacaactttgagtttacctacaactttgaggaggtgcccttccactccagcttcgctcccagtcagaacctcttcaagctggccaacccgctggtggaccagtacttgtaccgcttcgtgagcacaaataacactggcggagtccagttcaacaagaacctggccgggagatacgccaacacctacaaaaactggttcccggggcccatgggccgaacccagggctggaacctgggctccggggtcaaccgcgccagtgtcagcgccttcgccacgaccaataggatggagctcgagggcgcgagttaccaggtgcccccgcagccgaacggcatgaccaacaacctccagggcagcaacacctatgccctggagaacactatgatcttcaacagccagccggcgaacccgggcaccaccgccacgtacctcgagggcaacatgctcatcaccagcgagagcgagacgcagccggtgaaccgcgtggcgtacaacgtcggcgggcagatggccaccaacaaccagagctccaccactgcccccgcgaccggcacgtacaacctccaggaaatcgtgcccggcagcgtgtggatggagagggacgtgtacctccaaggacccatctgggccaagatcccagagacgggggcgcactttcacccctctccggccatgggcggattcggactcaaacacccaccgcccatgatgctcatcaagaacacgcctgtgcccggaaatatcaccagcttctcggacgtgcccgtcagcagcttcatcacccagtacagcaccgggcaggtcaccgtggagatggagtgggagctcaagaaggaaaactccaagaggtggaacccagagatccagtacacaaacaactacaacgacccccagtttgtggactttgccccggacagcaccggggaatacagaaccaccagacctatcggaacccgataccttacccgacccctttaa

SEQ ID NO: 779 - protein, 724 aa, Artificial Sequence
  Description of Artificial Sequence: Synthetic polypeptide
MSFVDHPPDWLEEVGEGLREFLGLEAGPPKPKPNQQHQDQARGLVLPGYNYLGPGNGLDRGEPVNRADGVAREHDISYNEQLEAGDNPYLKYNHADAEFQEKLADDTSFGGNLGKAVFQAKKRVLEPFGLVEEGAKTAPTGKRIDDHFPKRKKARTEEDSKPSTSSDAEAGPSGSQQLQIPAQPASSLGADTMSAGGGGPLGDNNQGADGVGNASGDWHCDSTWMGDRVVTKSTRTWVLPSYNNHQYREIKSGSVDGSNANAYFGYSTPWGYFDFNRFHSHWSPRDWQRLINNYWGFRPRSLRVKIFNIQVKEVTVQDSTTTIANNLTSTVQAFTDDDYQLPYVVGNGTEGCLPAFPPQVFTLPQYGYATLNRDNTENPTERSSFFCLEYFPSKMLRTGNNFEFTYNFEEVPFHSSFAPSQNLFKLANPLVDQYLYRFVSTNNTGGVQFNKNLAGRYANTYKNWFPGPMGRTQGWNLGSGVNRASVSAFATTNRMELEGASYQVPPQPNGMTNNLQGSNTYALENTMIFNSQPANPGTTATYLEGNMLITSESETQPVNRVAYNVGGQMATNNQSSTTAPATGTYNLQEIVPGSVWMERDVYLQGPIWAKIPETGAHFHPSPAMGGFGLKHPPPMMLIKNTPVPGNITSFSDVPVSSFITQYSTGQVTVEMEWELKKENSKRWNPEIQYTNNYNDPQFVDFAPDSTGEYRTTRPIGTRYLTRPL

SEQ ID NO: 780 - DNA, 2175 bp, Artificial Sequence
  Description of Artificial Sequence: Synthetic polynucleotide
atgtcttttgttgatcaccctccagattggttggaagaagttggtgaaggtcttcgcgagtttttgggccttgaagcgggcccaccgaaaccaaaacccaatcagcagcatcaagatcaagcccgtggtcttgtgctgcctggttataactatctcggacccggaaacggtctcgatcgaggagagcctgtcaacagggcagacgaggtcgcgcgagagcacgacatctcgtacaacgagcagcttgaggcgggagacaacccctacctcaagtacaaccacgcggacgccgagtttcaggagaagctcgccgacgacacatccttcgggggaaacctcggaaaggcagtctttcaggccaagaaaagggttctcgaaccttttggcctggttgaagagggtgctaagacggcccctaccggaaagcggatagacgaccactttccaaaaagaaagaaggcccggaccgaagaggactccaagccttccacctcgtcagacgccgaagctggacccagcggatcccagcagctgcaaatcccagcccaaccagcctcaagtttgggagctgatacaatgtctgcgggaggtggcggcccattgggcgacaataaccaaggtgccgatggagtgggcaatgcctcgggagattggcattgcgattccacgtggatgggggacagagtcgtcaccaagtccacccgaacctgggtgctgcccagctacaacaaccaccagtaccgagagatcaaaagcggctccgtcgacggaagcaacgccaacgcctactttggatacagcaccccctgggggtactttgactttaaccgcttccacagccactggagcccccgagactggcaaagactcatcaacaactactggggcttcagaccccggtccctcagagtcaaaatcttcaacattcaagtcaaagaggtcacggtgcaggactccaccaccaccatcgccaacaacctcacctccaccgtccaagtgtttacggacgacgactaccagctgccctacgtcgtcggcaacgggaccgagggatgcctgccggccttccctccgcaggtctttacgctgccgcagtacggttacgcgacgctgaaccgcgacaacacagaaaatcccaccgagaggagcagcttcttctgcctagagtactttcccagcaagatgctgagaacgggcaacaactttgagtttacctacaactttgaggaggtgcccttccactccagcttcgctcccagtcagaacctcttcaagctggccaacccgctggtggaccagtacttgtaccgcttcgtgagcacaaataacactggcggagtccagttcaacaagaacctggccgggagatacgccaacacctacaaaaactggttcccggggcccatgggccgaacccagggctggaacctgggctccggggtcaaccgcgccagtgtcagcgccttcgccacgaccaataggatggagctcgagggcgcgagttactaggtgcccccgcagccgaacggcatgaccaacaacctccagggcagcaacacctatgccctggagaacactatgatcttcaacagccagccggcgaacccgggcaccaccgccacgtacctcgagggcaacatgctcatcaccagcgagagcgagacgcagccggtgaaccgcgtggcgtacaacgtcggcgggcagatggccaccaacaaccagagctccaccactgcccccgcgaccggcacgtacaacctccaggaaatcgtgcccggcagcgtgtggatggagggggacgtgtacctccaaggacccatctgggccaagatcccagagacgggggcgcactttcacccctctccggccatgggcggattcggactcaagcacccaccgcccatgatgctcatcaagaacacgcctgtgcccggaaatatcaccagcttctcggacgtgcccgtcagcagcttcatcacccagtacagcaccgggcaggtcaccgtggagatggagtgggagctcaagaaggaaaactccaagaggtggaacccagagatccagtacacaaacaactacaacgacccccagtttgtggactttgccccggacagcaccggggaatacagaaccaccagacctatcggaacccgataccttacccgacccctttaa

SEQ ID NO: 781 - protein, 723 aa, Artificial Sequence
  Description of Artificial Sequence: Synthetic polypeptide
MSFVDHPPDWLEEVGEGLREFLGLEAGPPKPKPNQQHQDQARGLVLPGYNYLGPGNGLDRGEPVNRADEVAREHDISYNEQLEAGDNPYLKYNHADAEFQEKLADDTSFGGNLGKAVFQAKKRVLEPFGLVEEGAKTAPTGKRIDDHFPKRKKARTEEDSKPSTSSDAEAGPSGSQQLQIPAQPASSLGADTMSAGGGGPLGDNNQGADGVGNASGDWHCDSTWMGDRVVTKSTRTWVLPSYNNHQYREIKSGSVDGSNANAYFGYSTPWGYFDFNRFHSHWSPRDWQRLINNYWGFRPRSLRVKIFNIQVKEVTVQDSTTTIANNLTSTVQVFTDDDYQLPYVVGNGTEGCLPAFPPQVFTLPQYGYATLNRDNTENPTERSSFFCLEYFPSKMLRTGNNFEFTYNFEEVPFHSSFAPSQNLFKLANPLVDQYLYRFVSTNNTGGVQFNKNLAGRYANTYKNWFPGPMGRTQGWNLGSGVNRASVSAFATTNRMELEGASYVPPQPNGMTNNLQGSNTYALENTMIFNSQPANPGTTATYLEGNMLITSESETQPVNRVAYNVGGQMATNNQSSTTAPATGTYNLQEIVPGSVWMEGDVYLQGPIWAKIPETGAHFHPSPAMGGFGLKHPPPMMLIKNTPVPGNITSFSDVPVSSFITQYSTGQVTVEMEWELKKENSKRWNPEIQYTNNYNDPQFVDFAPDSTGEYRTTRPIGTRYLTRPL

SEQ ID NO: 782 - DNA, 2175 bp, Artificial Sequence
  Description of Artificial Sequence: Synthetic polynucleotide
atgtcttttgttgatcaccctccagattggttggaagaagttggtgaaggtcttcgcgagtttttgggccttgaagcgggcccaccgaaaccaaaacccaatcagcagcatcaagatcaagcccgtggtcttgtgctgcctggttataactatctcggacccggaaacggtctcgatcgaggagagcctgtcaacagggcagacgaggtcgcgcgagagcacgacatctcgtacaacgagcagcttgaggcgggagacaacccctacctcaagtacaaccacgcggacgccgagtttcaggagaagctcgccgacgacacatccttcgggggaaacctcggaaaggcagtctttcaggccaagaaaagggttctcgaaccttttggcctggttgaagagggtgctaagacggcccctaccggaaagcggatagacgaccactttccaaaaagaaagaaggtccggaccgaagaggactccaagccttccacctcgtcagacgccgaagctggacccagcggatcccagcagctgcaaatcccagcccaaccagcctcaagtttgggagctgatacaatgtctgcgggaggtggcggcccattgggcgacaataaccaaggtgccgatggagtgggcaatgcctcgggagattggcattgcgattccacgtggatgggggacagagtcgtcaccaagtccacccgaacctgggtgctgcccagctacaacaaccaccagtaccgagagatcaaaagcggctccgtcgacggaagcaacgccaacgcctactttggatacagcaccccctgggggtactttgactttaaccgcttccacagccactggagcccccgagactggcaaagactcatcaacaactactggggcttcagaccccggtccctcagagtcaaaatcttcaacattcaagtcaaagaggtcacggtgcaggactccaccaccaccatcgccaacaacctcacctccaccgtccaagtgtttacggacgacgactaccagctgccctacgtcgtcggcaacgggaccgagggatgcctgccggccttccctccgcaggtctttacgctgccgcagtacggttacgcgacgctgaaccgcgacaacacagaaaatcccaccgagaggagcagcttcttctgcctagagtactttcccagcaagatgctgagaacgggcaacaactttgagtttacctacaactttgaggaggtgcccttccactccagcttcgctcccagtcagaacctcttcaagctggccaacccgctggtggaccagtacttgtaccgcttcgtgagcacaaataacactggcggagtccagttcaacaagaacctggccgggagatacgccaacacctacaaaaactggttcccggggcccatgggccgaacccagggctggaacctgggctccggggtcaaccgcgccagtgtcagcgccttcgccacgaccaataggatggagctcgagggcgcgagttaccaggtgcccccgcagccgaacggcatgaccaacaacctccagggcagcaacacctatgccctggagaacactatgatcttcaacagccagccggcgaacccgggcaccaccgccacgtacctcgagggcaacatgctcatcaccagcgagagcgagacgcagccggtgaaccgcgtggcgtacaacgtcggcgggcagatggccaccaacaaccagagctccaccactgcccccgcgaccggcacgtacaacctccaggaaatcgtgcccggcagcgtgtggatggagagggacgtgtacctccaaggacccatctgggccaagatcccagagacgggggcgcactttcacccctctccggccatgggcggattcggactcaaacacccaccgcccatgatgctcatcaagaacacgcctgtgcccggaaatatcaccagcttctcggacgtgcccgtcagcagcttcatcacccagtacagcaccgggcaggtcaccgtggagatggagtgggagctcaagaaggaaaactccgagaggtggaacccagagatccagtacacaaacaactacaacgacccccagtttgtggactttgccccggacagcaccggggaatacagaaccaccagacctattggaacccgataccttacccgacccctttaa

SEQ ID NO: 783 - protein, 724 aa, Artificial Sequence
  Description of Artificial Sequence: Synthetic polypeptide
MSFVDHPPDWLEEVGEGLREFLGLEAGPPKPKPNQQHQDQARGLVLPGYNYLGPGNGLDRGEPVNRADEVAREHDISYNEQLEAGDNPYLKYNHADAEFQEKLADDTSFGGNLGKAVFQAKKRVLEPFGLVEEGAKTAPTGKRIDDHFPKRKKVRTEEDSKPSTSSDAEAGPSGSQQLQIPAQPASSLGADTMSAGGGGPLGDNNQGADGVGNASGDWHCDSTWMGDRVVTKSTRTWVLPSYNNHQYREIKSGSVDGSNANAYFGYSTPWGYFDFNRFHSHWSPRDWQRLINNYWGFRPRSLRVKIFNIQVKEVTVQDSTTTIANNLTSTVQVFTDDDYQLPYVVGNGTEGCLPAFPPQVFTLPQYGYATLNRDNTENPTERSSFFCLEYFPSKMLRTGNNFEFTYNFEEVPFHSSFAPSQNLFKLANPLVDQYLYRFVSTNNTGGVQFNKNLAGRYANTYKNWFPGPMGRTQGWNLGSGVNRASVSAFATTNRMELEGASYQVPPQPNGMTNNLQGSNTYALENTMIFNSQPANPGTTATYLEGNMLITSESETQPVNRVAYNVGGQMATNNQSSTTAPATGTYNLQEIVPGSVWMERDVYLQGPIWAKIPETGAHFHPSPAMGGFGLKHPPPMMLIKNTPVPGNITSFSDVPVSSFITQYSTGQVTVEMEWELKKENSERWNPEIQYTNNYNDPQFVDFAPDSTGEYRTTRPIGTRYLTRPL

SEQ ID NO: 784 - DNA, 2175 bp, Artificial Sequence
  Description of Artificial Sequence: Synthetic polynucleotide
atgtcttttgttgatcaccctccagattggttggaagaagttggtgaaggtcttcgcgagtttttgggccttgaagcgggcccaccgaaaccaaaacccaatcagcagcatcaagatcaagcccgtggtcttgtgctgcctggttataactatctcggacccggaaacggtctcgatcgaggagagcctgtcaacagggcagacgaggtcgcgcgagagcacgacatctcgtacagcgagcagcttgaggcgggagacaacccctacctcaagtacaaccacgcggacgccgagtttcaggagaagctcgccgacgacacatccttcgggggaaacctcggaaaggcagtctttcaggccaagaaaagggttctcgaaccttttggcctggttgaagagggtgctaagacggcccctaccggaaagcggatagacgaccactttccaaaaagaaagaaggcccggaccgaagaggactccaagccttccacctcgtcagacgccgaagctggacccagcggatcccagcagctgcaaatcccagcccaaccagcctcaagtttgggagctgatacaatgtctgcgggaggtggcggcccattgggcgacaataaccaaggtgccgatggagtgggcaatgcctcgggagattggcattgcgattccacgtggatgggggacagagtcgtcaccaagtccacccgaacctgggtgctgcccagctacaacaaccaccagtaccgagagatcaaaagcggctccgtcgacggaagcaacgccaacgcctactttggatacagcaccccctgggggtactttgactttaaccgcttccacagccactggagcccccgagactggcaaagactcatcaacaactactggggcttcagaccccggtccctcagagtcaaaatcttcaacattcaagtcaaagaggtcacggtgcaggactccaccaccaccatcgccaacaacctcacctccaccgtccaagtgtttacggacgacgactaccagctgccctacgtcgtcggcaacgggaccgagggatgcctgccggccttccctccgcaggtctttacgctgccgcagtacggttacgcgacgctgaaccgcgacaacacagaaaatcccaccgagaggagcagcttcttctgcctagagtactttcccagcaagatgctgagaacgggcaacaactttgagtttacctacaactttgaggaggtgcccttccactccagcttcgctcccagtcagaacctcttcaagctggccaacccgctggtggaccagtacttgtaccgcttcgtgagcacaaataacactggcggagtccagttcaacaagaacctggccgggagatacgccaacacctacaaaaactggttcccggggcccatgggccgaacccagggctggaacctgggctccggggtcaaccgcgccagtgtcagcgccttcgccacgaccaataggatggagctcgagggcgcgagttaccaggtgcccccgcagccgaacggcatgaccaacaacctccagggcagcaacacctatgccctggagaacactatgatcttcaacagccagccggcgaacccgggcaccaccgccacgtacctcgagggcaacatgctcatcaccagcgagagcgagacgcagccggtgaaccgcgtggcgtacaacgtcggcgggcagatggccaccaacaaccagagctccaccactgcccccgcgaccggcacgtacaacctccaggaaatcgtgcccggcagcgtgtggatggagagggacgtgtacctccaaggacccatctgggccaagatcccagagacgggggcgcactttcacccctctccggccatgggcggattcggactcaaacacccaccgcccatgatgctcatcaagaacacgcctgtgcccggaaatatcaccagcttctcggacgtgcccgtcagcagcttcatcacccagtacagcaccgggcaggtcaccgtggagatggagtgggagctcaagaaggaaaactccaagaggtggaacccagagatccagtacacaaacaactacaacgacccccagtttgtggactttgccccggacagcaccggggaatacagaaccgccagacctatcggaacccgataccttacccgacccctttaa

SEQ ID NO: 785 - protein, 724 aa, Artificial Sequence
  Description of Artificial Sequence: Synthetic polypeptide
MSFVDHPPDWLEEVGEGLREFLGLEAGPPKPKPNQQHQDQARGLVLPGYNYLGPGNGLDRGEPVNRADEVAREHDISYSEQLEAGDNPYLKYNHADAEFQEKLADDTSFGGNLGKAVFQAKKRVLEPFGLVEEGAKTAPTGKRIDDHFPKRKKARTEEDSKPSTSSDAEAGPSGSQQLQIPAQPASSLGADTMSAGGGGPLGDNNQGADGVGNASGDWHCDSTWMGDRVVTKSTRTWVLPSYNNHQYREIKSGSVDGSNANAYFGYSTPWGYFDFNRFHSHWSPRDWQRLINNYWGFRPRSLRVKIFNIQVKEVTVQDSTTTIANNLTSTVQVFTDDDYQLPYVVGNGTEGCLPAFPPQVFTLPQYGYATLNRDNTENPTERSSFFCLEYFPSKMLRTGNNFEFTYNFEEVPFHSSFAPSQNLFKLANPLVDQYLYRFVSTNNTGGVQFNKNLAGRYANTYKNWFPGPMGRTQGWNLGSGVNRASVSAFATTNRMELEGASYQVPPQPNGMTNNLQGSNTYALENTMIFNSQPANPGTTATYLEGNMLITSESETQPVNRVAYNVGGQMATNNQSSTTAPATGTYNLQEIVPGSVWMERDVYLQGPIWAKIPETGAHFHPSPAMGGFGLKHPPPMMLIKNTPVPGNITSFSDVPVSSFITQYSTGQVTVEMEWELKKENSKRWNPEIQYTNNYNDPQFVDFAPDSTGEYRTARPIGTRYLTRPL

SEQ ID NO: 786 - DNA, 2175 bp, Artificial Sequence
  Description of Artificial Sequence: Synthetic polynucleotide
atgtcttttgttgatcaccctccagattggttggaagaagttggtgaaggtcttcgcgagtttttgggccctgaagcgggcccaccgaaaccaaaacccaatcagcagcatcaagatcaagcccgtggtcttgtgctgcctggttataactatctcggacccggaaacggtctcgatcgaggagagcctgtcaacagggcagacgaggtcgcgcgagagcacgacatctcgtacaacgagcagcttgaggcgggagacaacccctacctcaagtacaaccacgcggacgccgagtttcaggagaagctcgccgacgacacatccttcgggggaaacctcggaaaggcagtctttcaggccaagaaaagggttctcgaaccttttggcctggttgaagagggtgctaagacggcccctaccggaaagcggatagacgaccactttccaaaaagaaagaaggcccggaccgaagaggactccaagccttccacctcgtcagacgccgaagctggacccagcggatcccagcagctgcaaatcccagcccaaccagcctcaagtttgggagctgatacaatgtctgcgggaggtggcggcccattgggcgacaataaccaaggtgccgatggagtgggcaatgcctcgggagattggcattgcgattccacgtggatgggggacagagtcgtcaccaagtccacccgaacctgggtgctgcccagctacaacaaccaccagtaccgagagatcaaaagcggctccgtcgacggaagcaacgccaacgcctactttggatacagcaccccctgggggtactttgactttaaccgcttccacagccactggagcccccgagactggcaaagactcatcaacaactactggggcttcagaccccggtccctcagagtcaaaatcttcaacattcaagtcaaagaggtcacggtgcaggactccaccaccaccatcgccaacaacctcacctccaccgtccaagtgtttacggacgacgactaccagctgccctacgtcgtcggcaacgggaccgagggatgcctgccggccttccctccgcaggtctttacgctgccgcagtacggttacgcgacgctgaaccgcgacaacacagaaaatcccaccgagaggagcagcttcttctgcctagagtactttcccagcaagatgctgagaacgggcaacaactttgagtttacctacaactttgaggaggtgcccttccactccagcttcgctcccagtcagaacctcttcaagctggccaacccgctggtggaccagtacttgtaccgcttcgtgagcacaaataacactggcggagtccagttcaacaagaacctggccgggagatacgccaacacctacaaaaactggttcccggggcccatgggccgaacccagggctggaacctgggctccggggtcaaccgcgccagtgtcagcgccttcgccacgaccaataggatggagctcgagggcgcgagttaccaggtgcccccgcagccgaacggcatgaccaacaacctccagggcagcaacacctatgccctggagaacactatgatcttcaacagccagccggcgaacccgggcaccaccgccacgtacctcgagggcaacatgctcatcaccagcgagagcgagacgcagccggtgaaccgcgtggcgtacaacgtcggcgggcagatgaccaccaacaaccagagctccaccactgcccccgcgaccggcacgtacaacctccaggaaatcgtgcccggcagcgtgtggatggagagggacgtgtacccccaaggacccatctgggccaagatcccagagacgggggcgcactttcacccctctccggccatgggcggattcggactcaaacacccaccgcccatgatgctcatcaagaacacgcctgtgcccggaaatatcaccagcttctcggacgtgcccgtcagcagcttcatcacccagtacagcaccgggcaggtcaccgtggagatggagtgggagctcaagaaggaaaactccaagaggtggaacccagagatccagtacacaaacaactacaacgacccccagtttgtggactttgccccggacagcaccggggaatacaggaccaccagacctatcggaacccgataccttacccgacccctttaa

SEQ ID NO: 787 - protein, 724 aa, Artificial Sequence
  Description of Artificial Sequence: Synthetic polypeptide
MSFVDHPPDWLEEVGEGLREFLGPEAGPPKPKPNQQHQDQARGLVLPGYNYLGPGNGLDRGEPVNRADEVAREHDISYNEQLEAGDNPYLKYNHADAEFQEKLADDTSFGGNLGKAVFQAKKRVLEPFGLVEEGAKTAPTGKRIDDHFPKRKKARTEEDSKPSTSSDAEAGPSGSQQLQIPAQPASSLGADTMSAGGGGPLGDNNQGADGVGNASGDWHCDSTWMGDRVVTKSTRTWVLPSYNNHQYREIKSGSVDGSNANAYFGYSTPWGYFDFNRFHSHWSPRDWQRLINNYWGFRPRSLRVKIFNIQVKEVTVQDSTTTIANNLTSTVQVFTDDDYQLPYVVGNGTEGCLPAFPPQVFTLPQYGYATLNRDNTENPTERSSFFCLEYFPSKMLRTGNNFEFTYNFEEVPFHSSFAPSQNLFKLANPLVDQYLYRFVSTNNTGGVQFNKNLAGRYANTYKNWFPGPMGRTQGWNLGSGVNRASVSAFATTNRMELEGASYQVPPQPNGMTNNLQGSNTYALENTMIFNSQPANPGTTATYLEGNMLITSESETQPVNRVAYNVGGQMTTNNQSSTTAPATGTYNLQEIVPGSVWMERDVYPQGPIWAKIPETGAHFHPSPAMGGFGLKHPPPMMLIKNTPVPGNITSFSDVPVSSFITQYSTGQVTVEMEWELKKENSKRWNPEIQYTNNYNDPQFVDFAPDSTGEYRTTRPIGTRYLTRPL

SEQ ID NO: 788 - DNA, 2175 bp, Artificial Sequence
  Description of Artificial Sequence: Synthetic polynucleotide
atgtcttttgttgatcaccctccagattggttggaagaagttggtgaaggtcttcgcgagtttttgggccttgaagcgggcccaccgaaaccaaaacccaatcagcagcatcaagatcaagcccgtggtcttgtgctgcctggttataactatctcggacccggaaacggtctcgatcgaggagagcctgtcaacagggcagacgaggtcgcgcgagagcacgacatctcgtacaacgagcagcttgaggcgggagacaacccctacctcaagtacaaccacgcggacgccgagtttcaggagaagctcgccgacgacacatccttcgggggaaacctcggaaaggcagtctttcaggccaagaaaagggttctcgaaccttttggcctggttgaagagggtgctaagacggcccctaccggaaagcggatagacgaccactttccaaaaagaaagaaggcccggaccgaagaggactccaagccttccacctcgtcagacgccgaagctggacccagcggatcccagcagctgcaaatcccagcccaaccagcctcaagtttgggagctgatacaatgtctgcgggaggtggcggcccattgggcgacaataaccaaggtgccgatggagtgggcaatgcctcgggagattggcattgcgattccacgtggatgggggacagagtcgtcaccaagtccacccgaacctgggtgctgcccagctacaacaaccaccagtaccgagagatcaaaagcggctccgtcgacggaagcaacgccaacgcctactttggatacagcaccccctgggggtactttgactttaaccgcttccacagccactggagcccccgagactggcaaagactcatcaacaactactggggcttcagaccccggtccctcagagtcaaaatcttcaacattcaagtcaaagaggtcacggtgcaggactccaccaccaccatcgccaacaacctcacctccaccgtccaagtgtttacggacgacgactaccagctgccctacgtcgtcggcaacgggaccgagggatgcctgccggccttccctccgcaggtctttacgctgccgcagtacggttacgcgacgctgaaccgcgacaacacagaaaatcccaccgagaggagcagcttcctctgcctagagtactttcccagcaagatgctgagaacgggcaacaactttgagtttacctacaactttgaggaggtgcccttccactccagcttcgctcccagtcagaacctcttcaagctggccaacccgctggtggaccagtacttgtaccgcttcgtgagcacaaataacactggcggagtccagttcaacaagaacctggccgggagatacgccaacacctacaaaaactggttcccggggcccatgggccgaacccagggctggaacctgggctccggggtcaaccgcgccagtgtcagcgccttcgccacgaccaataggatggagctcgagggcgcgagttaccaggtgcccccgcagccgaacggcatgaccaacaacctccagggcagcaacacctatgccctggagaacactatgatcttcaacagccagccggcgaacccgggcaccaccgccacgtacctcgagggcaacatgctcatcaccagcgagagcgagacgcagccggtgaaccgcgtggcgtacaacgtcggcgggcagatggccaccaacaaccagagctccaccactgcccccgcgaccggcacgtacaacctccaggaaatcgtgcccggcagcgtgtggatgaagagggacgtgtacctccaaggacccatctgggccaagatcccagagacgggggcgcactttcacccctctccggccatgggcggattcggactcaaacacccaccgcccatgatgctcatcaagaacacgcctgtgcccggaaatatcaccagcttctcggacgtgcccgtcagcagcttcatcacccagtacagcaccgggcaggtcaccgtggagatggagtgggagctcaagaaggaaaactccaagaggtggaacccagagatccagtacacaaacaactacaacgacccccagtttgtggactttgccccggacagcaccggggaatacagaaccaccagacctatcggaacccgataccttacccgacccctttaa

SEQ ID NO: 789 - protein, 724 aa, Artificial Sequence
  Description of Artificial Sequence: Synthetic polypeptide
MSFVDHPPDWLEEVGEGLREFLGLEAGPPKPKPNQQHQDQARGLVLPGYNYLGPGNGLDRGEPVNRADEVAREHDISYNEQLEAGDNPYLKYNHADAEFQEKLADDTSFGGNLGKAVFQAKKRVLEPFGLVEEGAKTAPTGKRIDDHFPKRKKARTEEDSKPSTSSDAEAGPSGSQQLQIPAQPASSLGADTMSAGGGGPLGDNNQGADGVGNASGDWHCDSTWMGDRVVTKSTRTWVLPSYNNHQYREIKSGSVDGSNANAYFGYSTPWGYFDFNRFHSHWSPRDWQRLINNYWGFRPRSLRVKIFNIQVKEVTVQDSTTTIANNLTSTVQVFTDDDYQLPYVVGNGTEGCLPAFPPQVFTLPQYGYATLNRDNTENPTERSSFLCLEYFPSKMLRTGNNFEFTYNFEEVPFHSSFAPSQNLFKLANPLVDQYLYRFVSTNNTGGVQFNKNLAGRYANTYKNWFPGPMGRTQGWNLGSGVNRASVSAFATTNRMELEGASYQVPPQPNGMTNNLQGSNTYALENTMIFNSQPANPGTTATYLEGNMLITSESETQPVNRVAYNVGGQMATNNQSSTTAPATGTYNLQEIVPGSVWMKRDVYLQGPIWAKIPETGAHFHPSPAMGGFGLKHPPPMMLIKNTPVPGNITSFSDVPVSSFITQYSTGQVTVEMEWELKKENSKRWNPEIQYTNNYNDPQFVDFAPDSTGEYRTTRPIGTRYLTRPL

SEQ ID NO: 790 - DNA, 2208 bp, Artificial Sequence
  Description of Artificial Sequence: Synthetic polynucleotide
atggctgccgatggttatcttccagattggctcgaggacaaccttagtgaaggaattcgcgagtggtgggctttgaaacctggagcccctcaacccagggcaaatcaacaacatcaagacaacgctcgaggtcttgtgcttccgggttacaaataccttggacccggcaacggactcgacaagggggagccggtcaacgcagccgacgcggcggccctcgagcacgacaaggcctacgaccagcagctcaaggccggagacaacccgtacctcaagtacaaccacgccgacgccgagttccaggagcggctcaaagaagatacgtcttttgggggcaacctcgggcgagcagtcttccaggccaaaaagaggcttcttgaacctcttggtctggttgaggaagcggctaagacggctcctggaaagaagaggcctgtagagcagtctcctcaggaaccggactcctccgcgggtattggcaaatcgggtgcacagcccgctaaaaagagactcaatttcggtcagactggcgacacagagtcagtcccagaccctcaaccaatcggagaacctcccgcagccccctcaggtgtgggatctcttacaatggcttcaggtggtggcgcaccagtggcagacaataacgaaggtgccgatggagtgggtagttcctcgggaaattggcattgcgattcccaatggctgggggacagagtcatcaccaccagcacccgaacctgggccctgcccacctacaacaatcacctctacaagcaaatctccaacagcacatctggaggatcttcaaatgacaacgcctacttcggctacagcaccccctgggggtattttgacttcaacagattccactgccacttctcaccacgtgactggcagcgactcatcaacaacaactggggattccggcctaagcgactcaacttcaagctcttcaacattcaggtcaaagaggttacggacaacaatggagtcaagaccatcgccaataaccttaccagcacggtccaggtcttcacggactcagactgtcagctcccgtacgtgctcgggtcggctcacgagggctgcctcccgccgttcccagcggacgttttcatgattcctcagtacgggtatctgacgcttaatgatggaagccaggccgtgggtcgttcgtccttttactgcctggaatatttcccgtcgcaaatgctaagaacgggtaacaacttccagttcagctacgagtttgagaacgtacctttccatagcagctacgctcacagccaaagcctggaccgactaacgaatccactcatcgaccaatacttgtactatctctcaaagactattaacggttctggacagaatcaacaaacgctaaaattcagtgtggccggacccagcaacatggctgtccagggaagaaactacatacctggacccagctaccgacaacaacgtgtctcaaccactgtgactcaaaacaacaacagcgaatttgcttggcctggagcttcttcttgggctctcaatggacgtaatagcttgatgaatcctggacctgctatggccagccacaaagaaggagaggaccgtttctttcctttgtctggatctttaatttttggcaaacaaggaactggaagagacaacgtggatgcggacaaagtcatgataaccaacgaagaagaaattaaaactactaacccggtagcaacggagtcccatggacaagtggccacaaaccaccagagtgcccaagcacaggcgcagaccggctgggttcaaaaccaaggaatacttccgggtatggtttggcaggacagagatgtgtacctgcaaggacccatttgggccaaaattcctcacacggacggcaactttcacccttctccgctgatgggagggtttggaatgaagcacccgcctcctcagatcctcatcaaaaacacacctgtacctgcggatcctccaacggccttcaacaaggacaagctgaactctttcatcacccagtattctactggccaagtcagcgtggagatcgagtgggagctgcagaaggaaaacagcaagcgctggaacccggagatccagtacacttccaactattacaagtctaataatgttgaatttgctgttaatactgaaggtgtatatagtgaaccccgccccattggcaccagatacctgactcgtaatctg

SEQ ID NO: 791 - protein, 736 aa, Artificial Sequence
  Description of Artificial Sequence: Synthetic polypeptide
MAADGYLPDWLEDNLSEGIREWWALKPGAPQPRANQQHQDNARGLVLPGYKYLGPGNGLDKGEPVNAADAAALEHDKAYDQQLKAGDNPYLKYNHADAEFQERLKEDTSFGGNLGRAVFQAKKRLLEPLGLVEEAAKTAPGKKRPVEQSPQEPDSSAGIGKSGAQPAKKRLNFGQTGDTESVPDPQPIGEPPAAPSGVGSLTMASGGGAPVADNNEGADGVGSSSGNWHCDSQWLGDRVITTSTRTWALPTYNNHLYKQISNSTSGGSSNDNAYFGYSTPWGYFDFNRFHCHFSPRDWQRLINNNWGFRPKRLNFKLFNIQVKEVTDNNGVKTIANNLTSTVQVFTDSDCQLPYVLGSAHEGCLPPFPADVFMIPQYGYLTLNDGSQAVGRSSFYCLEYFPSQMLRTGNNFQFSYEFENVPFHSSYAHSQSLDRLTNPLIDQYLYYLSKTINGSGQNQQTLKFSVAGPSNMAVQGRNYIPGPSYRQQRVSTTVTQNNNSEFAWPGASSWALNGRNSLMNPGPAMASHKEGEDRFFPLSGSLIFGKQGTGRDNVDADKVMITNEEEIKTTNPVATESHGQVATNHQSAQAQAQTGWVQNQGILPGMVWQDRDVYLQGPIWAKIPHTDGNFHPSPLMGGFGMKHPPPQILIKNTPVPADPPTAFNKDKLNSFITQYSTGQVSVEIEWELQKENSKRWNPEIQYTSNYYKSNNVEFAVNTEGVYSEPRPIGTRYLTRNL

SEQ ID NO: 792 - DNA, 2208 bp, Artificial Sequence
  Description of Artificial Sequence: Synthetic polynucleotide
atggctgccgatggttatcttccagattggctcgaggacaaccttagtgaaggaattcgcgagtggtgggctttgaaacctggagcccctcaacccaaggcaaatcaacaacatcaagacaacgctcgaggtcttgtgcttccgggttacaaataccttggacccggcaacggactcgacaagggggagccggtcaacgcagcagacgcggcggccctcgagcacgacaaggcctacgaccagcagctcaaggccggagacaacccgtacctcaagtacaaccacgccgacgccgagttccaggagcggctcaaagaagatacgtcttttgggggcaacctcgggcgagcagtcttccaggccaaaaagaggcttcttgaacctcttggtctggttgaggaagcggctaagacggctcctggaaagaagaggcctgtagagcagtctcctcaggaaccggactcctccgcgggtattggcaaatcgggtgcacagcccgctaagaagagactcaatttcggtcagactggcgacacagagtcagtcccagaccctcaaccaatcggagaacctcccgcagccccctcaggtgtgggatctcttacaatggcttcaggtggtggcgcaccagtggcagacaataacgaaggtgccgatggagtgggtagttcctcgggaaattggcattgcgattcccaatggctgggggacagagtcatcaccaccagcacccgaacctgggccctgcccacctacaacaatcacctctacaagcaaatctccaacagcacatctggaggatcttcaaatgacaacgcctacttcggctacagcaccccctgggggtattttgacttcaacagattccactgccacttctcaccacgtgactggcagcgactcatcaacaacaactggggattccggcctaagcgactcaacttcaagctcttcaacattcaggtcaaagaggttacggacaacaatggagtcaagaccatcgccaataaccttaccagcacggtccaggtcttcacggactcagactatcagctcccgtacgtgctcgggtcggctcacgagggctgcctcccgccgttcccagcggacgttttcatgattcctcagtacgggtatctgacgcttaatgatggaagccaggccgtgggtcgttcgtccttttactgcctggaatatttcccgtcgcaaatgctaagaacgggtaacaacttccagttcagctacgagtttgagaacgtacctttccatagcagctacgctcacagccaaagcctggaccgactaatgaatccacccatcgaccaatacttgtactatctctcaaagactattaacggttctggacagaatcaacaaacgctaaaattcagtgtggccggacccagcaacatggctgtccagggaagaaactacatacctggacccagctaccgacaacaacgtgtctcaaccactgtgactcaaaacaacaacagcgaatttgcttggcctggagcttcttcttgggctctcaatggacgtaatagcttgatgaatcctggacctgctatggccagccacaaagaaggagaggaccgtttctttcctttgtctggatctttaatttttggcaaacaaggaactggaagagacaacgtggatgcggacaaagtcatgataaccaacgaagaagaaattaaaactactaacccggtagcaacggagtcctatggacaagtggccacaaaccaccagagtgcccaagcacaggcgcagaccggctgggttcaaaaccaaggaatacttccgggtatggtttggcaggacagagatgtgtacctgcaaggacccatttgggccaaaattcctcacacggacggcaactttcacccttctccgctgatgggagggtttggaatgaagcacccgcctcctcagatcctcatcaaaaacacacctgtacctgcggatcctccaacggccttcaacaaggacaagctgaactctttcatcacccagtattctactggccaagtcagcgtggagatcgagtgggagctgcagaaggaaaacagcaagcgctggaacccggagatccagtacacttccaactattacaagtctaataatgttgaatttgctgttaatactgaaggtgtatatggtgaaccccgccccattggcaccagatacctgactcgtaatctg

SEQ ID NO: 793 - protein, 736 aa, Artificial Sequence
  Description of Artificial Sequence: Synthetic polypeptide
MAADGYLPDWLEDNLSEGIREWWALKPGAPQPKANQQHQDNARGLVLPGYKYLGPGNGLDKGEPVNAADAAALEHDKAYDQQLKAGDNPYLKYNHADAEFQERLKEDTSFGGNLGRAVFQAKKRLLEPLGLVEEAAKTAPGKKRPVEQSPQEPDSSAGIGKSGAQPAKKRLNFGQTGDTESVPDPQPIGEPPAAPSGVGSLTMASGGGAPVADNNEGADGVGSSSGNWHCDSQWLGDRVITTSTRTWALPTYNNHLYKQISNSTSGGSSNDNAYFGYSTPWGYFDFNRFHCHFSPRDWQRLINNNWGFRPKRLNFKLFNIQVKEVTDNNGVKTIANNLTSTVQVFTDSDYQLPYVLGSAHEGCLPPFPADVFMIPQYGYLTLNDGSQAVGRSSFYCLEYFPSQMLRTGNNFQFSYEFENVPFHSSYAHSQSLDRLMNPPIDQYLYYLSKTINGSGQNQQTLKFSVAGPSNMAVQGRNYIPGPSYRQQRVSTTVTQNNNSEFAWPGASSWALNGRNSLMNPGPAMASHKEGEDRFFPLSGSLIFGKQGTGRDNVDADKVMITNEEEIKTTNPVATESYGQVATNHQSAQAQAQTGWVQNQGILPGMVWQDRDVYLQGPIWAKIPHTDGNFHPSPLMGGFGMKHPPPQILIKNTPVPADPPTAFNKDKLNSFITQYSTGQVSVEIEWELQKENSKRWNPEIQYTSNYYKSNNVEFAVNTEGVYGEPRPIGTRYLTRNL

SEQ ID NO: 794 - DNA, 2208 bp, Artificial Sequence
  Description of Artificial Sequence: Synthetic polynucleotide
atggctgccgatggttatcttccagattggctcgaggacaaccttagtgaaggaattcgcgagtggtgggctttgaaacctggagcccctcaacccaaggcaaatcaacaacatcaagacaacgctcgaggtcttgtgcttccgggttacaaataccttggacccggcaacggactcgacaagggggagccggtcaacgcagcagacgcggcggccctcgagcacgacaaggcctacgaccagcagctcaaggccggagacaacccgtacctcaagtacaaccacgccgacgccgagttccaggagcggctcaaagaagatacgtcttttgggggcaacctcgggcgagcagtcttccaggccaaaaagaggcttcttgaacctcttggtctggttgaggaagcggctaagacggctcctggaaagaagaggcctgtagagcagtctcctcaggaaccggactcctccgcgggtattggcaaatcgggtgcacagcccgctaaaaagagactcaatttcggtcagactggcgacacagagtcagtcccagaccctcaaccaatcggagaacctcccgcagccccctcaggtgtgggatctcttacaatggcttcaggtggtggcgcaccagtggcagacaataacgaaggtgccgatggagtgggtagttcctcgggaaattggcattgcgattcccaatggctgggggacagagtcatcaccaccagcacccgaacctgggccctgcccacctacaacaatcacctctacaagcaaatctccaacagcacatctggaggatcttcaaatgacaacgcctacttcggctacagcaccccctgggggtattttgacttcaacagattccactgccacttctcaccacgtgaccggcagcgactcatcaacaacaactggggattccggcctaagcgactcaacttcaagctcttcaacattcaggtcaaagaggttacggacaacaatggagtcaagaccatcgccaataaccttaccagcacggtccaggtcttcacggactcagactatcagctcccgtacgtgctcgggtcggctcacgagggctgcctcccgccgttcccagcggacgttttcatgattcctcagtacgggtatctgacgcttaatgatggaagccaggccgtgggtcgttcgtccttttactgcctggaatatttcccgtcgcaaatgctaagaacgggtaacaacttccagttcagctacgagtttgagaacgtacctttccatagcagctacgctcacagccaaagcctggaccgactaatgaatccactcatcgaccaatacttgtactatctctcaaagactattaacggttctggacagaatcaacaaacgctaaaattcagtgtggccggacccagcaacatggctgtccagggaagaaactacatacctggacccagctaccgacaacaacgtgtctcaaccactgtgactcaaaacaacaacagcgaatttgcttggcctggagcttcttcttgggctctcaatggacgtaatagcttgatgaatcctggacctgctatggccagccacaaagaaggagaggaccgtttctttcctttgtctggatctttaatttttggcaaacaaggaactggaagagacaacgtggatgcggacaaagtcatgataaccaacgaagaagaaattaaaactactaacccggtagcaacggagtcctatggacaagtggccacaaaccaccagagtgcccaagcacaggcgcagaccggctgggttcaaaaccaaggaatacttccgggtatggtttggcaggacagagatgtgtacctgcaaggacccatttgggccaaaattcctcacacggacggcaactttcacccttctccgctgatgggagggtttggaatgaagcacccgcctcctcagatcctcatcaaaaacacacctgtacctgcggatcctccaacggccttcaacaaggacaagctgaactctttcatcacccagtattctactggccaagtcagcgtggagatcgagtgggagctgcagaaggaaaacagcaagcgctggaacccggagatccagtacacttccaactattacaagtctaataatgttgaatttgctgttaatactgaaggtgtatatagtgaaccccgccccattggcaccagatacctgactcgtaatctg

SEQ ID NO: 795 - protein, 736 aa, Artificial Sequence
  Description of Artificial Sequence: Synthetic polypeptide
MAADGYLPDWLEDNLSEGIREWWALKPGAPQPKANQQHQDNARGLVLPGYKYLGPGNGLDKGEPVNAADAAALEHDKAYDQQLKAGDNPYLKYNHADAEFQERLKEDTSFGGNLGRAVFQAKKRLLEPLGLVEEAAKTAPGKKRPVEQSPQEPDSSAGIGKSGAQPAKKRLNFGQTGDTESVPDPQPIGEPPAAPSGVGSLTMASGGGAPVADNNEGADGVGSSSGNWHCDSQWLGDRVITTSTRTWALPTYNNHLYKQISNSTSGGSSNDNAYFGYSTPWGYFDFNRFHCHFSPRDRQRLINNNWGFRPKRLNFKLFNIQVKEVTDNNGVKTIANNLTSTVQVFTDSDYQLPYVLGSAHEGCLPPFPADVFMIPQYGYLTLNDGSQAVGRSSFYCLEYFPSQMLRTGNNFQFSYEFENVPFHSSYAHSQSLDRLMNPLIDQYLYYLSKTINGSGQNQQTLKFSVAGPSNMAVQGRNYIPGPSYRQQRVSTTVTQNNNSEFAWPGASSWALNGRNSLMNPGPAMASHKEGEDRFFPLSGSLIFGKQGTGRDNVDADKVMITNEEEIKTTNPVATESYGQVATNHQSAQAQAQTGWVQNQGILPGMVWQDRDVYLQGPIWAKIPHTDGNFHPSPLMGGFGMKHPPPQILIKNTPVPADPPTAFNKDKLNSFITQYSTGQVSVEIEWELQKENSKRWNPEIQYTSNYYKSNNVEFAVNTEGVYSEPRPIGTRYLTRNL

SEQ ID NO: 796 - DNA, 2208 bp, Artificial Sequence
  Description of Artificial Sequence: Synthetic polynucleotide
atggctgccgatggttatcttccagattggctcgaggacaaccttagtgaaggaattcgcgagtggtgggctttgaaacctggagcccctcaacccaaggcaaatcaacaacatcaagacaacgctcgaggtcttgtgcttccgggttacaaataccttggacccggcaacggactcgacaagggggagccggtcaacgcagcagacgcggcagccctcgagcacgacaaggcctacgaccagcagctcaaggccggagacaacccgtacctcaagtacaaccacgccgacgccgagttccaggagcggctcaaagaagatacgtcttttgggggcaacctcgggcgagcagtcttccaggccaaaaagaggcttcttgaacctcttggtctggttgaggaagcggctaagacggctcctggaaagaagaggcctgtagagcagtctcctcaggaaccggactcctccgcgggtattggcaaatcgggtgcacagcccgctaaaaagagactcaatttcggtcagactggcgacacagagtcagtcccagaccctcaaccaatcggagaacctcccgcagccccctcaggtgtgggatctcttacaatggcttcaggtggtggcgcaccagtggcagacaataacgaaggtgccgatggagtgggtagttcctcgggaaattggcattgcaattcccaatggctgggggacagagtcatcaccaccagcacccgaacctgggccctgcccacctacaacaatcacctctacaagcaaatctccaacagcacatctggaggatcttcaaatgacaacgcctacttcggctacagcaccccctgggggtattttgacttcaacagattccactgccacttctcaccacgtgactggcagcgactcatcaacaacaactggggattccggcctaagcgactcaacttcaagctcttcaacattcaggtcaaagaggttacggacaacaatggagtcaagaccatcgccaataaccttaccagcacggtccaggtcttcacggactcagactatcagctcccgtacgtgctcgggtcggctcacgagggctgcctcccgccgttcccagcggacgttttcatgattcctcagtacgggtatctgacgcttaatgatggaagccaggccgtgggtcgttcgtccttttactgcctggaatatttcccgtcgcaaatgctaagaacgggtaacaacttccagttcagctacgagtttgagaacgtacctttccatagcagctacgctcacagccaaagcctggaccgactaatgaatccactcatcgaccaatacttgtactatctctcaaagactattaacggttctggacagaatcaacaaacgctaaaattcagtgtggccggacccggcaacatggctgtccagggaagaaactacatacctggacccagctaccgacaacaacgtgtctcaaccactgtgactcaaaacaacaacagcgaatttgcttggcctggagcttcttcttgggctctcaatggacgtaatagcttgatgaatcctggacctgctatggccagccacaaagaaggagaggaccgtttctttcctttgtctggatctttaatttttggcaaacaaggaactggaagagacaacgtggatgcggacaaagtcatgataaccaacgaagaagaaattaaaactactaacccggtagcaacggagtcctatggacaagtggccacaaaccaccagagtgcccaagcacaggcgcagaccggctgggttcaaaaccaaggaatacttccgggtatggtttggcaggacagagatgtgtacctgcaaggacccatttgggccaaaattcctcacacggacggcaactttcacccttctccgctgatgggagggtttggaatgaagcacccgcctcctcagatcctcatcaagaacacacctgtacctgcggatcctccaacggccttcaacaaggacaagctgaactctttcatcacccagtattctactggccaagtcagcgtggagatcgagtgggagctgcagaaggaaaacagcaagcgctggaacccggagatccagtacacttccaactattacaagtctaataatgttgaatttgctgttaatactgaaggtgtatatagtgaaccccgccccattggcaccagatacctgactcgtaatctg

SEQ ID NO: 797 - protein, 736 aa, Artificial Sequence
  Description of Artificial Sequence: Synthetic polypeptide
MAADGYLPDWLEDNLSEGIREWWALKPGAPQPKANQQHQDNARGLVLPGYKYLGPGNGLDKGEPVNAADAAALEHDKAYDQQLKAGDNPYLKYNHADAEFQERLKEDTSFGGNLGRAVFQAKKRLLEPLGLVEEAAKTAPGKKRPVEQSPQEPDSSAGIGKSGAQPAKKRLNFGQTGDTESVPDPQPIGEPPAAPSGVGSLTMASGGGAPVADNNEGADGVGSSSGNWHCNSQWLGDRVITTSTRTWALPTYNNHLYKQISNSTSGGSSNDNAYFGYSTPWGYFDFNRFHCHFSPRDWQRLINNNWGFRPKRLNFKLFNIQVKEVTDNNGVKTIANNLTSTVQVFTDSDYQLPYVLGSAHEGCLPPFPADVFMIPQYGYLTLNDGSQAVGRSSFYCLEYFPSQMLRTGNNFQFSYEFENVPFHSSYAHSQSLDRLMNPLIDQYLYYLSKTINGSGQNQQTLKFSVAGPGNMAVQGRNYIPGPSYRQQRVSTTVTQNNNSEFAWPGASSWALNGRNSLMNPGPAMASHKEGEDRFFPLSGSLIFGKQGTGRDNVDADKVMITNEEEIKTTNPVATESYGQVATNHQSAQAQAQTGWVQNQGILPGMVWQDRDVYLQGPIWAKIPHTDGNFHPSPLMGGFGMKHPPPQILIKNTPVPADPPTAFNKDKLNSFITQYSTGQVSVEIEWELQKENSKRWNPEIQYTSNYYKSNNVEFAVNTEGVYSEPRPIGTRYLTRNL

SEQ ID NO: 798 - DNA, 2208 bp, Artificial Sequence
  Description of Artificial Sequence: Synthetic polynucleotide
atggctgccgatggttatcttccagattggctcgaggacaaccttagtgaaggaattcgcgagtggtgggctttgaaacctggagcccctcaacccaaggcaaatcaacaacatcaagacaacgctcgaggtcttgtgcttccgggttacagataccttggacccggcaacggactcgacaagggggagccggtcaacgcagcagacgcggcggccctcgagcacgacaaggcctacgaccagcagctcaaggccggagacaacccgtacctcaagtacaaccacgccgacgccgagttccaggagcggctcaaagaagatacgtcttttgggggtaacctcgggcgagcagtcttccaggccaaaaagaggcttcttgaacctcttggtctggttgaggaagcggctaagacggctcctggaaagaagaggcctgtagagcagtctcctcaggaaccggactcctccgcgggtatcggcaaatcgggtgcacagcccgctaaaaagagactcaatttcggtcagactggcgacacagagtcagtcccagaccctcaaccaatcggagaacctcccgcagccccctcaggtgtgggatctcttacaatggcttcaggtggtggcgcaccagtggcagacaataacgaaggtgccgatggagtgggtagttcctcgggaaattggcattgcgattcccaatggctgggggacagagtcatcaccaccagcacccgaacctgggccctgcccacctacaacaatcacctctacaagcaaatctccaacagcacatctggaggatcttcaaatgacaacgcctacttcggctacagcaccccctgggggtattttgacttcaacagattccactgccacttctcaccacgtgactggcagcgactcatcaacaacaactggggattccggcctaagcgactcaacttcaagctcttcaacattcaggtcaaagaggttacggacaacaatggagtcaagaccgtcgccaataaccttaccagcacggtccaggtcttcacggactcagactatcagctcccgtacgtgctcgggtcggctcacgagggctgcctcccgccgttcccagcggacgttttcatgattcctcagtacgggtatctgacgcttaatgatggaagccaggccgtgggtcgttcgtccttttactgcctggaatatttcccgtcgcaaatgctaagaacgggtaacaacttccagttcagctacgagtttgagaacgtacctttccatagcagctacgctcacagccaaagcctggaccgactaatgaatccactcatcgaccaatacttgtactatctctcaaagactattaacggttctggacagaatcaacaaacgctaaaattcagtgtggccggacccagcaacatggctgtccagggaagaaactacatacctggacccagctaccgacaacaacgtgtctcaaccactgtgactcaaaacaacaacagcgaatttgcttggcctggagcttcttcttgggctctcaatggacgtaatagcttgatgaatcctggacctgctatggccagccacaaagaaggagaggaccgtttctttcctttgtctggatctttaatttttggcaaacaaggaactggaagagacaacgtggatgcggacaaagtcatgataaccaacgaagaagaaattaaaactactaacccggtagcaacggagtcctatggacaagtggccacaaaccaccagagtgcccaagcacaggcgcagaccggctgggttcaaaaccaaggaatacttccgggtatggtttggcaggacagagatgtgtacctgcaaggacccatttgggccaaaattcctcacacggacggcaactttcacccttctccgctgatgggagggtttggaatgaagcacccgcctcctcagatcctcatcaaaaacacacctgtacctgcggatcctccaacggccttcaacaaggacaagctgaactctttcatcacccagtattctactggccaagtcagcgtggagatcgagtgggagctgcagaaggaaaacagcaagcgctggaacccggagatccagtacacttccaactattacaagtctaataatgttgaatttgctgttaatactgaaggtgtatatagtggaccccgccccattggcaccagatacctgactcgtaatctg

SEQ ID NO: 799 - protein, 736 aa, Artificial Sequence
  Description of Artificial Sequence: Synthetic polypeptide
MAADGYLPDWLEDNLSEGIREWWALKPGAPQPKANQQHQDNARGLVLPGYRYLGPGNGLDKGEPVNAADAAALEHDKAYDQQLKAGDNPYLKYNHADAEFQERLKEDTSFGGNLGRAVFQAKKRLLEPLGLVEEAAKTAPGKKRPVEQSPQEPDSSAGIGKSGAQPAKKRLNFGQTGDTESVPDPQPIGEPPAAPSGVGSLTMASGGGAPVADNNEGADGVGSSSGNWHCDSQWLGDRVITTSTRTWALPTYNNHLYKQISNSTSGGSSNDNAYFGYSTPWGYFDFNRFHCHFSPRDWQRLINNNWGFRPKRLNFKLFNIQVKEVTDNNGVKTVANNLTSTVQVFTDSDYQLPYVLGSAHEGCLPPFPADVFMIPQYGYLTLNDGSQAVGRSSFYCLEYFPSQMLRTGNNFQFSYEFENVPFHSSYAHSQSLDRLMNPLIDQYLYYLSKTINGSGQNQQTLKFSVAGPSNMAVQGRNYIPGPSYRQQRVSTTVTQNNNSEFAWPGASSWALNGRNSLMNPGPAMASHKEGEDRFFPLSGSLIFGKQGTGRDNVDADKVMITNEEEIKTTNPVATESYGQVATNHQSAQAQAQTGWVQNQGILPGMVWQDRDVYLQGPIWAKIPHTDGNFHPSPLMGGFGMKHPPPQILIKNTPVPADPPTAFNKDKLNSFITQYSTGQVSVEIEWELQKENSKRWNPEIQYTSNYYKSNNVEFAVNTEGVYSGPRPIGTRYLTRNL

SEQ ID NO: 800 - DNA, 2208 bp, Artificial Sequence
  Description of Artificial Sequence: Synthetic polynucleotide
atggctgccgatggttatcttccagattggctcgaggacaaccttagtgaaggaattcgcgagtggtgggctttgaaacctggagcccctcaacccaaggcaaatcaacaacatcaagacaacgctcgaggtcttgtgcttccgggttacaaataccttggacccggcaacggactcgacaagggggagccggtcaacgcagcagacgcggcggccctcgagcacgacaaggcctacgaccagcagctcaaggccggagacaacccgtacctcaagtacaaccacgccgacgccgagttccaggagcggctcaaagaagatacgtcttttgggggcaacctcgggcgagcagtcttccaggccaaaaagaggcttcttgaacctcttggtctggttgaggaagcggctaagacggctcctggaaagaagaggcctgtagagcagtctcctcaggaaccggactcctccgcgggtattggcaaatcgggtgcacagcccgctaaaaagagactcaatttcggtcagactggcgacacagagtcagtcccagaccctcaaccaatcggagaacctcccgcagccccctcaggtgtgggatctcttacaatggcttcaggtggtggcgcaccagtggcagacaataacgaaggtgccgatggagtgggtagttcctcgggaaattggcattgcgattcccaatggctgggggacagagtcatcaccaccagcacccgaacctgggccctgcccacctacaacaatcacctctacaagcaaatctccaacagcacatctggaggatcttcaaatgacaacgcctacttcggctacagcaccccctgggggtattttgacttcaacagattccactgccacttctcaccacgtgactggcagcgactcatcaacaacaactggggattccggcctaagcgactcaacttcaagctcttcaacattcaggtcaaagaggttacggacaacaatggagtcaagaccatcgccaataaccttaccagcacggtccaggtcttcacggactcagactatcagctcccgtacgtgctcgggtcggctcacgagggctgcctcccgccgttcccagcggacgttttcatgattcctcagtacgggtatctgacgcttaatgatggaagccaggccgtgggtcgttcgtccttttactgcctggaatatttcccgtcgcaaatgctaagaacgggtaacaacttccagttcagctacgagtttgagaacgtacctttccatagcagctacgctcacagccaaagcctggaccgactaatgaatccactcatcgaccaatacttgtactatctctcaaagactattaacggttctggacagaatcaacaaacgctaaaattcagtgtggccggacccagcaacatggctgtccagggaagaaactacatacctggacccagctaccgacaacaacgtgtctcaaccactgtgactcaaaacaacaacagcgaatttgcttggcctggagcttcttcttgggctctcaatggacgtaatagcttgatgaatcctggacctgctatggccagccacaaagaaggagaggaccgtttctttcctttgtctggatctttaatttttggcaaacaaggaactggaagagacaacgtggatgcggacaaagtcatgataaccaacgaagaagaaattaaaactactaacccggtagcaacggagtcctatggacaagtggccacaaaccaccagagtgcccaagcacaggcgcagaccggctgggttcaaaaccaaggaatacttccgggtatggtttggcaggacagagatgtgtacctgcaaggacccatttgggccaaaattcctcacacggacggcaactttcacccttctccgctgatgggagggtttggaatgaagcacccgcctcctcagatcctcatcaaaaacacacctgtacctgcggatcctccaacggccttcaacaaggacaagctgaactctttcatcacccagtattctactggccaagtcagcgtggagatcgagtgggagctgcagaaggaaaacagcaagcgctggaacccggagatccagtacacttccaactattacaagtctaataatgttgaatttgctgttaatactgaaggtgtatatagtgaaccccgccccattggcaccagatacctgactcgtaatctg

SEQ ID NO: 801 - protein, 736 aa, Artificial Sequence; identical to SEQ ID NO: 147
  Description of Artificial Sequence: Synthetic polypeptide

SEQ ID NO: 802 - DNA, 2208 bp, Artificial Sequence
  Description of Artificial Sequence: Synthetic polynucleotide
atggctgccgatggttatcttccagattggctcgaggacaaccttagtgaaggaattcgcgagtggtgggctttgaaacctggagcccctcaacccaaggcaaatcaacaacgtcaagacaacgctcgaggtcttgtgcttccgggttacaaataccttggacccggcaacggactcgacaagggggagccggtcaacgcagcagacgcggcggccctcgagcacgacaaggcctacgaccagcagctcaaggccggaggcaacccgtgcctcaagtacaaccacgccgacgccgagttccaggagcggctcaaagaagatacgtcttttgggggcaacctcgggcgagcagtcttccaggccaaaaagaggcttcttgaacctcttggtctggttgaggaagcggctaagacggctcctggaaagaagaggcctgtagagcagtctcctcaggaaccggactcctccgcgggtattggcagatcgggtgcacagcccgctaaaaagagactcaatttcggtcagactggcgacacagagtcagtcccagaccctcaaccaatcggagaacctcccgcagccccctcaggtgtgggatctcttacaatggcttcaggtggtggcgcaccagtggcagacaataacgaaggtgccgatggagtgggtagttcctcgggaaattggcattgcgattcccaatggctgggggacagagtcatcaccaccagcacccgaacctgggccctgcccacctacaacaatcacctctacaagcaaatctccaacagcacatctggaggatcttcaaatgacaacgcctacttcggctacagcaccccctgggggtattttgacttcaacagattccactgccacttctcaccacgtgactggcagcgactcatcaacaacaactggggattccggcctaagcgactcaacttcaagctcttcaacattcaggtcaaagaggttacggacaacaatggagtcaaggccatcgccaataaccttaccagcacggtccaggtcttcacggactcagactatcagctcccgtacgtgctcgggtcggctcacgagggctgcctcccgccgttcccagcggacgttttcatgattcctcagtacgggtatctgacgcttaatgatggaagccaggccgtgggtcgttcgtccttttactgcctggaatatttcccgtcgcaaatgctaagaacgggtaacaacttccagttcagctacgagtttgagaacgtacctttccatagcagctacgctcacagccaaagcctggaccgactaatgaatccactcatcgaccaatacttgtactatctctcaaagactattgacggttctggacagaatcaacaaacgctaaaattcagtgtggccggacccagcaacatggctgtccagggaagaaactacatacctggacccagctaccgacaacaacgtgtctcaaccactgtgactcaaaacaacaacagcgaatttgcttggcctggagcttcttcttgggctctcaatggacgtaatagcttgatggatcctggacctgctatggccagccacaaagaaggagaggaccgtttctttcctttgtctggatctttaatttttggcaaacaaggaactggaagagacaacgtggatgcggacaaagtcatgataaccaacgaagaagaaattaaaactactaacccggtagcaacggagtcctatggacaagtggccacaaaccaccagagtgcccaagcacaggcgcagaccggctgggttcaaaaccaaggaatacttccgggtatggtttggcaggacagagatgtgtacctgcaaggacccatttgggccaaaattcctcacacgggcggcaactttcacccttctccgctgatgggagggtttggaatgaagcacccgcctcctcagatcctcatcaaaaacacacctgtacctgcggatcctccaacggccttcaacaaggacaagctgaactctttcatcacccagtattctactggccaagtcagcgtggagatcgagtgggagctgcagaaggaaaacagcaagcgctggaacccggagatccagtacacttccaactattacaagtctaataatgttgaatttgctgttaatactgaaggtgtatatagtgaaccccgccccattggcaccagatacctgactcgtaatctg

SEQ ID NO: 803 - protein, 736 aa, Artificial Sequence
  Description of Artificial Sequence: Synthetic polypeptide
MAADGYLPDWLEDNLSEGIREWWALKPGAPQPKANQQRQDNARGLVLPGYKYLGPGNGLDKGEPVNAADAAALEHDKAYDQQLKAGGNPCLKYNHADAEFQERLKEDTSFGGNLGRAVFQAKKRLLEPLGLVEEAAKTAPGKKRPVEQSPQEPDSSAGIGRSGAQPAKKRLNFGQTGDTESVPDPQPIGEPPAAPSGVGSLTMASGGGAPVADNNEGADGVGSSSGNWHCDSQWLGDRVITTSTRTWALPTYNNHLYKQISNSTSGGSSNDNAYFGYSTPWGYFDFNRFHCHFSPRDWQRLINNNWGFRPKRLNFKLFNIQVKEVTDNNGVKAIANNLTSTVQVFTDSDYQLPYVLGSAHEGCLPPFPADVFMIPQYGYLTLNDGSQAVGRSSFYCLEYFPSQMLRTGNNFQFSYEFENVPFHSSYAHSQSLDRLMNPLIDQYLYYLSKTIDGSGQNQQTLKFSVAGPSNMAVQGRNYIPGPSYRQQRVSTTVTQNNNSEFAWPGASSWALNGRNSLMDPGPAMASHKEGEDRFFPLSGSLIFGKQGTGRDNVDADKVMITNEEEIKTTNPVATESYGQVATNHQSAQAQAQTGWVQNQGILPGMVWQDRDVYLQGPIWAKIPHTGGNFHPSPLMGGFGMKHPPPQILIKNTPVPADPPTAFNKDKLNSFITQYSTGQVSVEIEWELQKENSKRWNPEIQYTSNYYKSNNVEFAVNTEGVYSEPRPIGTRYLTRNL

SEQ ID NO: 804 - DNA, 2208 bp, Artificial Sequence
  Description of Artificial Sequence: Synthetic polynucleotide
atggctgccgatggttatcttccagattggctcgaggacaaccttagtgaaggaattcgcgagtggtgggctttgaaacctggagcccctcaacccaaggcaaatcaacaacatcaagacaacgctcgaggtcttgtgcttccgggttacaaataccttggacccggcaacggactcgacaagggggagccggtcaacgcagcagacgcggcggccctcgagcacgacaaggcctacgaccagcagctcaaggccggagacaacccgtacctcaagtacaaccacgccgacgccgagttccaggagcggctcaaagaagatacgtcttttgggggcaacctcgggcgagcagtcttccaggccaaaaagaggcttcttgaacctcttggtctggttgaggaagcggctaagacggctcctggaaagaagaggcctgtagagcagtctcctcaggaaccggactcctccgcgggtattggcaaatcgggtgcacagcccgctaaaaagagactcaatttcggtcagactggcgacacagagtcagtcccagaccctcaaccaatcggagaacctcccgcagccccctcaggtgtgggatctcttacaatggcttcaggtggtggcgcaccagtggcagacaataacgaaggtgccgatggagtgggtagttcctcgggaaattggcattgcgattcccaatggctgggggacagagtcatcaccaccagcacccgaacctgggccctgcccacctacaacaatcacctctacaagcaaatctccaacagcacatctggaggatcttcaaatgacaacgcctacttcggctacagcaccccctgggggtattttgacttcaacagattccactgccacttctcaccacgtgactggcagcgactcatcaacaacaactggggattccggcctaagcgactcaacttcaagctcttcaacattcaggtcaaagaggttacggacaacaatggagtcaagaccatcgccaataaccttaccagcacggtccaggtcttcacggactcagactatcagctcccgtacgtgctcgggtcggctcacgagggctgcctcccgccgttcccagcggacgttttcatgattcctcagtacgggtatctgacgcttaatgatggaagccaggccgtgggtcgttcgtccttttactgcctggaatatttcccgtcgcaaatgctaagaacgggtaacaacttccagttcagctacgagtttgagaacgtacctttccatagcagctacgctcacagccaaagcctggaccgactaatgaatccactcatcgaccaatacttgtactatctctcaaagactattaacggttctggacagaatcaacaaacgctaaaattcagtgtggccggacccagcaacatggctgtccagggaagaaactacatacctggacccagctaccgacaacaacgtgtctcaaccactgtgactcaaaacaacaacagcgaatttgcttggcctggagcttcttcttgggctctcaatggacgtaatagcttgatgaatcctggacctgctatggccagccacaaagaaggagaggaccgtttctttcctttgtctggatctttaatttttggcaaacaaggaactggaagagacaacgtggatgcggacaaagtcatgataaccaacgaagaagaaattaaaactactaacccggtagcaacggagtcctatggacaagtggccacaaaccaccagagtgcccaagcacaggcgcagaccggctgggttcaaaaccaaggaatacttccgggtatggtttggcaggacagagatgtgtacctgcaaggacccatttgggccaaaattcctcacacggacggcaactttcacccttctccgctgatgggagggtttggaatgaagcacccgcctcctcagatcctcatcaaaaacacacctgtacctgcggatcctccaacggccttcaacaaggacaagctgaactctttcatcacccagtattctactggccaagtcagcgtggagatcgagtgggagctgcagaaggaaaacagcaagcgctggaacccggagatccagtacacttccaactattacaagcctaataatgttgaatttgctgttaatactgaaggtgtatatagtgaaccccgccccattggcaccagatacctgactcgtaatctg

SEQ ID NO: 805 - protein, 736 aa, Artificial Sequence
  Description of Artificial Sequence: Synthetic polypeptide
MAADGYLPDWLEDNLSEGIREWWALKPGAPQPKANQQHQDNARGLVLPGYKYLGPGNGLDKGEPVNAADAAALEHDKAYDQQLKAGDNPYLKYNHADAEFQERLKEDTSFGGNLGRAVFQAKKRLLEPLGLVEEAAKTAPGKKRPVEQSPQEPDSSAGIGKSGAQPAKKRLNFGQTGDTESVPDPQPIGEPPAAPSGVGSLTMASGGGAPVADNNEGADGVGSSSGNWHCDSQWLGDRVITTSTRTWALPTYNNHLYKQISNSTSGGSSNDNAYFGYSTPWGYFDFNRFHCHFSPRDWQRLINNNWGFRPKRLNFKLFNIQVKEVTDNNGVKTIANNLTSTVQVFTDSDYQLPYVLGSAHEGCLPPFPADVFMIPQYGYLTLNDGSQAVGRSSFYCLEYFPSQMLRTGNNFQFSYEFENVPFHSSYAHSQSLDRLMNPLIDQYLYYLSKTINGSGQNQQTLKFSVAGPSNMAVQGRNYIPGPSYRQQRVSTTVTQNNNSEFAWPGASSWALNGRNSLMNPGPAMASHKEGEDRFFPLSGSLIFGKQGTGRDNVDADKVMITNEEEIKTTNPVATESYGQVATNHQSAQAQAQTGWVQNQGILPGMVWQDRDVYLQGPIWAKIPHTDGNFHPSPLMGGFGMKHPPPQILIKNTPVPADPPTAFNKDKLNSFITQYSTGQVSVEIEWELQKENSKRWNPEIQYTSNYYKPNNVEFAVNTEGVYSEPRPIGTRYLTRNL

SEQ ID NO: 806 - DNA, 2208 bp, Artificial Sequence
  Description of Artificial Sequence: Synthetic polynucleotide
atggctgccgatggttatcttccagattggctcgaggacaaccttagtgaaggaattcgcgagtggtgggctttgaaacctggagcccctcaacccaaggcaaatcaacaacatcaagacaacgctcgaggtcttgtgcttccgggttacaaataccttggacccggcaacggactcgacaagggggagccggtcaacgcagcagacgcggcggccctcgagcacaacaaggcctacgaccagcagctcaaggccggagacaacccgtacctcaagtgcaaccacgccgacgccgagttccaggagcggctcaaagaagatacgtcttttgggggcaacctcgggcgagcagtcttccaggccaaaaagaggcctcttgaacctcttggtctggttgaggaagcggctaagacggctcctggaaagaagaggcctgtagagcagtctcctcaggaaccggactcctccgcgggtattggcaaatcgggtgcacagcccgctaaaaagagactcaatttcggtcagactggcgacacagagtcagtcccagaccctcaaccaatcggagaacctcccgcagccccctcaggtgtgagatctcttacaatggcttcaggtggtggcgcaccagtggcagacaataacgaaggtgccgatggagtgggtagttcctcgggaaattggcattgcgattcccaatggctgggggacagagtcatcaccaccagcacccgaacctgggccctgcccacctacaacaatcacctctacaagcaaatctccaacagcacatctggaggatcttcaaatgacaacgcctacctcggctacagcaccccctgggggtattttgacttcaacagattccactgccacttctcaccacgtgactggcagcgactcatcaacaacaactggggattccggcctaagcgactcaacttcaagctcttcaacattcaggtcaaagaggttacggacaacaatggagtcaagaccatcgccaataaccttaccagcacggtccaggtcttcacggactcagactatcagctcccgtacgtgctcgggtcggctcacgagggctgcctcccgccgttcccagcggacgttttcatgattcctcagtacgggtatctgacgcttaatgatggaagccaggccgtgggtcgttcgtccttttactgcctggaatatttcccgtcgcaaatgctaagaacgggtaacaacttccagttcagctacgagtttgagaacgtacctttccatagcagctacgctcacagccaaagcctggaccgactaatgaatccactcatcgaccaatacttgtactatctctcaaagactattaacggttctggacagaatcaacaaacgctaaaattcagtgtggccggacccagcaacatggctgtccagggaagaaactacatacctggacccagctaccgacaacaacgtgtctcaaccactgtgactcaaaacaacaacagcgaatttgcttggcctggagcttcttcttgggctctcaatggacgtaatagcttgatgaatcctggacctactatggccagccacaaagaaggagaggaccgtttctttcctttgtctggatctttaatttttggcaaacaaggaactggaagagacaacgtggatgcggacaaagtcatgataaccaacgaagaagaaattaaaactactaacccggtagcaacggagtcctatggacaagtggccacaaaccaccagagtgcccaagcacaggcgcagaccggctgggttcaaaaccaaggaatacttccgggtatggtttggcaggacagagatgtgtacctgcaaggacccatttgggccaaaattcctcacacggacggcaactttcacccttctccgctgatgggagggtttggaatgaagcacccgcctcctcagatcctcatcaaaaacacacctgtacctgcggatcctccaacggccttcaacaaggacaagctgaactctttcatcacccagtattctactggccaagtcagcgtggagatcgagtgggagctgcagaaggaaaacagcaagcgctggaacccggagatccagtacacttccaactattacaagtctaataatgttgaatttgctgttaatactgaaggtgtatatagtgaaccccgccccattggcaccagatacctgactcgtaatctg

SEQ ID NO: 807 - protein, 736 aa, Artificial Sequence
  Description of Artificial Sequence: Synthetic polypeptide
MAADGYLPDWLEDNLSEGIREWWALKPGAPQPKANQQHQDNARGLVLPGYKYLGPGNGLDKGEPVNAADAAALEHNKAYDQQLKAGDNPYLKCNHADAEFQERLKEDTSFGGNLGRAVFQAKKRPLEPLGLVEEAAKTAPGKKRPVEQSPQEPDSSAGIGKSGAQPAKKRLNFGQTGDTESVPDPQPIGEPPAAPSGVRSLTMASGGGAPVADNNEGADGVGSSSGNWHCDSQWLGDRVITTSTRTWALPTYNNHLYKQISNSTSGGSSNDNAYLGYSTPWGYFDFNRFHCHFSPRDWQRLINNNWGFRPKRLNFKLFNIQVKEVTDNNGVKTIANNLTSTVQVFTDSDYQLPYVLGSAHEGCLPPFPADVFMIPQYGYLTLNDGSQAVGRSSFYCLEYFPSQMLRTGNNFQFSYEFENVPFHSSYAHSQSLDRLMNPLIDQYLYYLSKTINGSGQNQQTLKFSVAGPSNMAVQGRNYIPGPSYRQQRVSTTVTQNNNSEFAWPGASSWALNGRNSLMNPGPTMASHKEGEDRFFPLSGSLIFGKQGTGRDNVDADKVMITNEEEIKTTNPVATESYGQVATNHQSAQAQAQTGWVQNQGILPGMVWQDRDVYLQGPIWAKIPHTDGNFHPSPLMGGFGMKHPPPQILIKNTPVPADPPTAFNKDKLNSFITQYSTGQVSVEIEWELQKENSKRWNPEIQYTSNYYKSNNVEFAVNTEGVYSEPRPIGTRYLTRNL

SEQ ID NO: 808 - DNA, 2208 bp, Artificial Sequence
  Description of Artificial Sequence: Synthetic polynucleotide
atggctgccgatggttatcctccagattggctcgaggacaaccttagtgaaggaattcgcgagtggtgggctttgaaacctggagcccctcaacccaaggcaaatcaacaacatcaagacaacgctcgaggtcttgtgcttccgggttacaaataccttggacccggcaacggactcgacaagggggagccggtcaacgcagcagacgcggcggccctcgagcacgacaaggcctacgaccagcagctcaaggccggggacaacccgcacctcaagtacaaccacgccgacgccgagttccaggagcggctcaaagaagatacgtcttttgggggcaacctcgggcgagcagtcttccaggccaaaaagaggcttcttgaacctcttggtctggttgaggaagcggctaagacggctcctggaaagaagaggcccgtagagcagtctcctcaggaaccggactcctccgcgggtattggcaaatcgggtgcacagcccgctaagaagagactcaatttcggtcagactggcgacactgagtcagtcccagaccctcaaccaatcggagaacctcccgcagccccctcaggtgtgggatctcttacaatggcttcaggtggtggcgcaccagtggcagacaataacgaaggtgccgatggagtgggtagttcctcgggaaattggcattgcgattcccaatggctgggggacagagtcatcaccaccagcacccgaacctgggccctgcccacctacaacaatcacctctacaagcaaatctccaacagcacatctggaggatcttcaaatgacaacgcctacttcggctacagcaccccctgggggtattttgacttcaacagattccactgccacttctcaccacgtgactggcagcgactcatcaacaacaactggggattccggcctaagcgactcaacttcaagctcttcaacattcaggtcaaagaggttacggacaacaatggagtcaagaccatcgccaataaccttaccagcacggtccaggtcttcacggactcagactatcagctcccgtacgtgctcgggtcggctcacgagggctgcctcccgccgttcccagcggacgttttcatgattcctcagtacgggtatctgacgcttaatgatggaagccaggccgtgggtcgttcgtccttttactgcctggaatatttcccgtcgcaaatgctaagaacgggtaacaacttccagttcagctacgagtttgagaacgtacctttccatagcagctacgctcacagccaaagcctggaccgactaatgaatccactcatcgaccaatacttgtactatctctcaaagactattaacggttctggacagaatcaacaaacgctaaaattcagtgtggccggacccagcaacatggctgtccagggaagaaactacatacctggacccagctaccgacaacaacgtgtctcaaccactgtgactcaaaacaacaacagcgaatttgcttggcctggagcttcttcttgggctctcaatggacgtaatagcttgatgaatcctggacctgctatggccagccacaaagaaggagaggaccgtttctttcctttgtctggatctttaatttttggcaaacaaggaactggaagagacaacgtggatgcggacaaagtcatgataaccaacgaagaagaaattaaaactactaacccggtagcaacggagtcctatggacaagtggccacaaaccaccagagtgcccaagcacaggcgcagaccggctgggttcaaaaccaaggaatacttccgggtatggtttggcaggacagagatgtgtacctgcaaggacccatttgggccaaaattcctcacacggacggcaactttcacccttctccgctgatgggagggtttggagtgaagcacccgcctcctcagatcctcatcaaaaacacacctgtacctgcggatcctccaacggccttcaacaaggacaggctgaactctttcatcacccagtattctactggccaagtcagcgtggagatcgagtgggagctgcagaaggaaaacagcaagcgctggaacccggagatccagtacacttccaactattacaagtctaataatgttgaatttgctgttaatactgaaggtgtatatagtgaaccccgccccattggcaccagatacctgactcgtaatctg

SEQ ID NO: 809 - protein, 736 aa, Artificial Sequence
  Description of Artificial Sequence: Synthetic polypeptide
MAADGYPPDWLEDNLSEGIREWWALKPGAPQPKANQQHQDNARGLVLPGYKYLGPGNGLDKGEPVNAADAAALEHDKAYDQQLKAGDNPHLKYNHADAEFQERLKEDTSFGGNLGRAVFQAKKRLLEPLGLVEEAAKTAPGKKRPVEQSPQEPDSSAGIGKSGAQPAKKRLNFGQTGDTESVPDPQPIGEPPAAPSGVGSLTMASGGGAPVADNNEGADGVGSSSGNWHCDSQWLGDRVITTSTRTWALPTYNNHLYKQISNSTSGGSSNDNAYFGYSTPWGYFDFNRFHCHFSPRDWQRLINNNWGFRPKRLNFKLFNIQVKEVTDNNGVKTIANNLTSTVQVFTDSDYQLPYVLGSAHEGCLPPFPADVFMIPQYGYLTLNDGSQAVGRSSFYCLEYFPSQMLRTGNNFQFSYEFENVPFHSSYAHSQSLDRLMNPLIDQYLYYLSKTINGSGQNQQTLKFSVAGPSNMAVQGRNYIPGPSYRQQRVSTTVTQNNNSEFAWPGASSWALNGRNSLMNPGPAMASHKEGEDRFFPLSGSLIFGKQGTGRDNVDADKVMITNEEEIKTTNPVATESYGQVATNHQSAQAQAQTGWVQNQGILPGMVWQDRDVYLQGPIWAKIPHTDGNFHPSPLMGGFGVKHPPPQILIKNTPVPADPPTAFNKDRLNSFITQYSTGQVSVEIEWELQKENSKRWNPEIQYTSNYYKSNNVEFAVNTEGVYSEPRPIGTRYLTRNL

SEQ ID NO: 810 - DNA, 2208 bp, Artificial Sequence
  Description of Artificial Sequence: Synthetic polynucleotide
atggctgccgatggttatcttccagattggctcgaggacaaccttagtgaaggaattcgcgagtggtgggctttgaaacctggagcccctcaacccaaggcaaatcaacaacatcaagacaacgctcgaggtcttgtgcttccgggttacaaataccttggacccggcaacggactcgacaagggggagccggtcaacgcagcagacgcggcggccctcgagcacgacaaggcctacgaccagcagctcaaggccggagacaacccgtacctcaagtacaaccacgccgacgccgagttccaggagcggctcaaagaagatacgtcttttgggggcaacctcgggcgagcagtcttccaggccaaaaagaggcttcttgaacctcttggtctggttgaggaagcggctaagacggctcctggaaagaagaggcctgtagagcagtctcctcaggaaccggactcctccgcgggtattggcaaatcgggtgcacagcccgctaaaaagagactcaatttcggtcagactggcgacacagagtcagtcccagaccctcaaccaatcggagaacctcccgcagccccctcaggtgtgggatctcttacaatggcttcaggtggtggcgcaccagtggcggacaataacgaaggtgccgatggagtgggtagttcctcgggaaattggcattgcgattcccaatggctgggggacagagtcatcaccaccagcacccgaacctgggccctgcccacctacaacaatcacctctacaagcaaatctccaacagcacatctggaggatcttcaaatgacaacgcctacttcggctacagcaccccctgggggtattttgacttcaacagattccactgccacttctcaccacgtgactggcagcgactcatcaacaacaactggggattccggcctaagcgactcaacttcaagctcttcaacattcaggtcaaagaggttacggacaacaatggagtcaagaccatcgccaataaccttaccagcacggtccaggtcttcacggactcagactatcagctcccgtacgtgctcgggtcggctcacgagggctgcctcccgccgttcccagcggacgttttcatgattcctcagtacgggtatctgacgcttaatgatggaagccaggccgtgggtcgttcgtccttttactgcctggaatatttcccgtcgcaaatgctaagaacgggtaacaacttccagttcagctacgagtttgagaacgtacctttccatagcagctacgctcacagccaaagcctggaccgactaatgaatccactcatcgaccaatacttgtactatctctcaaagactattaacggttctggacagaatcaacaaacgctaaaattcagtgtggccggacccagcaacatggctgtccagggaagaaactacatacctggacccagctaccgacaacaacgtgtctcaaccactgtgactcaaaacaacaacagcgaatttgcttggcctggagcttcttcttgggctctcaatggacgtaatagtttgatgaatcctggacctgctatggccagccacaaagaaggagaggaccgtttctttcctttgtctggatctttaatttttggcaaacaaggaactggaagagacaacgtggatgcggacaaagtcatgataaccaacgaagaagaaattaaaactactaacccggtagcaacggagtcctatggacaagtggccacaaaccaccagagtgcccaagcacaggcgcagaccggctgggttcaaaaccaaggaatacttccgggtatggtttggcaggacagagatgtgtacctgcaaggacccatttgggccaaaattcctcacacggacggcaactttcacccttctccgctgatgggagggtttggagtgaagcacccgcctcctcagatcctcatcaaaaacacacctgtacctgcggatcctccaacggccttcaacaaggacaagctgaactctttcatcacccagtattctactggccaagtcagcgtggagatcgagtgggagctgcagaaggaaaacagcaagcgctggaacccggagatccagtacacttccaactattacaagtctaataatgttgaatttgctgttaatactgaaggtgtatatagtgaaccccgccccattggcaccagatacctgactcgtaatctg

SEQ ID NO: 811 - protein, 736 aa, Artificial Sequence
  Description of Artificial Sequence: Synthetic polypeptide
MAADGYLPDWLEDNLSEGIREWWALKPGAPQPKANQQHQDNARGLVLPGYKYLGPGNGLDKGEPVNAADAAALEHDKAYDQQLKAGDNPYLKYNHADAEFQERLKEDTSFGGNLGRAVFQAKKRLLEPLGLVEEAAKTAPGKKRPVEQSPQEPDSSAGIGKSGAQPAKKRLNFGQTGDTESVPDPQPIGEPPAAPSGVGSLTMASGGGAPVADNNEGADGVGSSSGNWHCDSQWLGDRVITTSTRTWALPTYNNHLYKQISNSTSGGSSNDNAYFGYSTPWGYFDFNRFHCHFSPRDWQRLINNNWGFRPKRLNFKLFNIQVKEVTDNNGVKTIANNLTSTVQVFTDSDYQLPYVLGSAHEGCLPPFPADVFMIPQYGYLTLNDGSQAVGRSSFYCLEYFPSQMLRTGNNFQFSYEFENVPFHSSYAHSQSLDRLMNPLIDQYLYYLSKTINGSGQNQQTLKFSVAGPSNMAVQGRNYIPGPSYRQQRVSTTVTQNNNSEFAWPGASSWALNGRNSLMNPGPAMASHKEGEDRFFPLSGSLIFGKQGTGRDNVDADKVMITNEEEIKTTNPVATESYGQVATNHQSAQAQAQTGWVQNQGILPGMVWQDRDVYLQGPIWAKIPHTDGNFHPSPLMGGFGVKHPPPQILIKNTPVPADPPTAFNKDKLNSFITQYSTGQVSVEIEWELQKENSKRWNPEIQYTSNYYKSNNVEFAVNTEGVYSEPRPIGTRYLTRNL

SEQ ID NO: 812 - DNA, 2208 bp, Artificial Sequence
  Description of Artificial Sequence: Synthetic polynucleotide
atggctgccgatggttatcttccagattggctcgaggacaaccttagtgaaggaattcgcgagtggtgggctttgaaacctggagcccctcaacccaaggcaaatcaacaacatcaagacaacgctcgaggtcttgtgcttccgggttacaaataccttggacccggcaacggactcgacaagggggagccggtcaacgcagcagacgcggcggccctcgagcacgacaaggcctacgaccagcagctcaaggccggagacaacccgtacctcaagtacaaccacgccgacgccgagttccaggagcggctcaaagaagatacgtcttttgggggcaacctcgggcgagcagtcttccaggccaaaaagaggcttcttgaacctcttggtctggttgaggaagcggctaagacggctcctggaaagaagaggcctgtagagcagtctcctcaggaaccggactcctccgcgggtattggcaaatcgggtgcacagcccgctaaaaagagactcaatttcggtcagactggcgacacagagtcagtcccagaccctcaaccaatcggagaacctcccgcagccccctcaggtgtgggatctcttacaatggcttcaggtggtggcgcaccagtggcagacaataacgaaggtgccgatggagtgggtagttcctcgggaaattggcattgcgattcccaatggctgggggacagagtcatcaccaccagcacccgaacctgggccctgcccacttacaacaatcacctctacaagcaaatctccaacagcacatctggaggatcttcaaatgacaacgcctacttcggctacagcaccccctgggggtattttgacttcaacagattccactgccacttctcaccacgtgactggcagcgactcaccaacaacaactggggattccggcctaagcgactcaacttcaagctcttcaacattcaggtcaaagaggttacggacaacaatggagtcaagaccatcgccaataaccttaccagcacggtccaggtcttcacggactcagactatcagctcccgtacgtgctcgggtcggctcacgagggctgcctcccgccgttcccagcggacgttttcatgattcctcagtacgggtatctgacgcttaatgatggaagccaggccgtgggtcgttcgtccttttactgcctggaatatatcccgtcgcaaatgctaagaacgggtaacaacttccagttcagctacgagtttgagaacgtacctttccatagcagctacgctcacagccaaagcctggaccgactaatgaatccactcatcgaccaatacttgtactatctctcaaagactattaacggttctggacagaatcaacaaacgctaaaattcagtgtggccggacccagcaacatggctgtccagggaagaaactacatacctggacccagctaccgacaacaacgtgtctcaaccactgtgactcaaaacaacaacagcgaatttgcttggcctggagcttcttcttgggctctcaatggacgtaatagcttgatgaatcctggacctgctatggccagccacaaagaaggagaggaccgtttctttcctttgtctggatctttaatttttggcaaacaaggaactggaagagacaacgtggatgcggacaaagtcatgataaccaacgaagaagaaattaaaactactaacccggtagcaacggagtcctatggacaagtggccacaaaccaccagagtgcccaagcacaggcgcagaccggctgggttcaaaaccaaggaatacttccgggtatggtttggcaggacagagatgtgtacctgcaaggacccatttgggccaaaattcctcacacggacggcaactttcacccttctccgctgatgggagggtttggagtgaagcacccgcctcctcagatcctcatcaaaaacacacctgtacctgcggatcctccaacggccttcaacaaggacaagctgaactctttcatcacccagtattctactggccaagtcagcgtggagatcgagtgggagctgcagaaggaaaacagcaagcgctggaacccggagatccagtacacttccaactattacaagtctaataatgttgaatttgctgttaatactgaaggtgtatatagtgaaccccgccccattggcaccagatacctgactcgtaatctg

SEQ ID NO: 813 - protein, 736 aa, Artificial Sequence
  Description of Artificial Sequence: Synthetic polypeptide
MAADGYLPDWLEDNLSEGIREWWALKPGAPQPKANQQHQDNARGLVLPGYKYLGPGNGLDKGEPVNAADAAALEHDKAYDQQLKAGDNPYLKYNHADAEFQERLKEDTSFGGNLGRAVFQAKKRLLEPLGLVEEAAKTAPGKKRPVEQSPQEPDSSAGIGKSGAQPAKKRLNFGQTGDTESVPDPQPIGEPPAAPSGVGSLTMASGGGAPVADNNEGADGVGSSSGNWHCDSQWLGDRVITTSTRTWALPTYNNHLYKQISNSTSGGSSNDNAYFGYSTPWGYFDFNRFHCHFSPRDWQRLTNNNWGFRPKRLNFKLFNIQVKEVTDNNGVKTIANNLTSTVQVFTDSDYQLPYVLGSAHEGCLPPFPADVFMIPQYGYLTLNDGSQAVGRSSFYCLEYIPSQMLRTGNNFQFSYEFENVPFHSSYAHSQSLDRLMNPLIDQYLYYLSKTINGSGQNQQTLKFSVAGPSNMAVQGRNYIPGPSYRQQRVSTTVTQNNNSEFAWPGASSWALNGRNSLMNPGPAMASHKEGEDRFFPLSGSLIFGKQGTGRDNVDADKVMITNEEEIKTTNPVATESYGQVATNHQSAQAQAQTGWVQNQGILPGMVWQDRDVYLQGPIWAKIPHTDGNFHPSPLMGGFGVKHPPPQILIKNTPVPADPPTAFNKDKLNSFITQYSTGQVSVEIEWELQKENSKRWNPEIQYTSNYYKSNNVEFAVNTEGVYSEPRPIGTRYLTRNL

SEQ ID NO: 814 - DNA, 2208 bp, Artificial Sequence
  Description of Artificial Sequence: Synthetic polynucleotide
atggctgccgatggttatcttccagattggctcgaggacaaccttagtgaaggaattcgcgagtggtgggctttgaaacctggagcccctcaacccaaggcaaatcaacaacatcaagacaacgctcgaggtcttgtgcttccgggttacaaataccttggacccggcaacggactcgacaagggggagccggtcaacgcagcagacgcggcggccctcgagcacgacaaggcctacgaccagcagctcaaggccggagacaacccgtacctcaagtacaaccacgccgacgccgagttccaggagcggctcaaagaagatacgtcttttgggggcaacctcgggcgagcagtcttccaggccaaaaagaggcttcttgaacctcttggtctggttgaggaagcggctaagacggctcctggaaagaagaggcctgtagagcagtctcctcaggaaccggactcctccgcgggtattggcaaatcgggtgcacagcccgctaaaaagagactcaatttcggtcagactggcgacacagagtcagtcccagaccctcaaccaatcggagaacctcccgcagccccctcaggtgtgggatctcttacaatggcttcaggtggtggcgcaccagtggcagacaataacgaaggtgccgatggagtgggtagttcctcgggaaattggcattgcgattcccaatggctgggggacagagtcatcaccaccagcacccgaacctgggccctgcccacctacaacaatcacctctacaagcaaatctccaacagcacatctggaggatcttcaaatgacaacgcctacttcggctacagcaccccctgggggtattttgacttcaacagattccactgccacttctcaccacgtgactggcagcgactcatcaacaacaactggggattccggcctaagcgactcaacttcaagctcttcaacattcaggtcaaagaggttacggacaacaatggagtcaagaccatcgccaataaccttaccagcacggtccaggtcttcacggactcagactatcagctcccgtacgtgctcgggtcggctcacgagggctgcctcccgccgttcccagcggacgttttcatgattcctcagtacgggtatctgacgcttaatgatggaagccaggccgtgggtcgttcgtccttttactgcctggaatatttcccgtcgcaaatgctaagaacgggtaacaacttccagtttagctacgagtttgagaacgtacctttccatagcagctacgctcacagccaaagcctggaccgactaatgaatccactcatcgaccaatacttgtactatctctcaaagactattaacggttctggacagaatcaacaaacgctaaaattcagtgtggccggacccagcaacatggctgtccagggaagaaactacatacctggacccagctaccgacaacaacgtgtctcaaccactgtgactcaaaacaacaacagcgaatttgcttggcctggagcttcttcttgggctctcaatggacgtaatagcttgatgaatcctggacctgctatggccagccacaaagaaggagaggaccgtttctttcctttgtctggatctttaatttctggcaaacaaggaactggaagagacaacgtggatgcgaacaaagtcatgataaccaacgaagaagaaattaaaactactaacccggtagcaacggagtcctatggacaagtggccacaaaccaccagagtgcccaagcacaggcgcagaccggctgggttcaaaaccaaggaatacttccgggtatggtttggcaggacagagatgtgtacctgcaaggacccatttgggccaaaattcctcacacggacggcaactttcacccttctccgctgatgggagggtttgaaatgaagcacccgcctcctcagatcctcatcaaaaacacacctgtacctgcggatcctccaacggccttcaacaaggacaagctgaactctttcatcacccagtattctactggccaagtcagcgtggagatcgagtgggagctgcagaaggaaaacagcaagcgctggaacccggagatccagtacacttccaactattacaagtctaataatgttgaatttgctgttaatactgaaggtgtatatagtgaaccccgccccattggcaccagatacctgactcgtaatctg

SEQ ID NO: 815 - protein, 736 aa, Artificial Sequence
  Description of Artificial Sequence: Synthetic polypeptide
MAADGYLPDWLEDNLSEGIREWWALKPGAPQPKANQQHQDNARGLVLPGYKYLGPGNGLDKGEPVNAADAAALEHDKAYDQQLKAGDNPYLKYNHADAEFQERLKEDTSFGGNLGRAVFQAKKRLLEPLGLVEEAAKTAPGKKRPVEQSPQEPDSSAGIGKSGAQPAKKRLNFGQTGDTESVPDPQPIGEPPAAPSGVGSLTMASGGGAPVADNNEGADGVGSSSGNWHCDSQWLGDRVITTSTRTWALPTYNNHLYKQISNSTSGGSSNDNAYFGYSTPWGYFDFNRFHCHFSPRDWQRLINNNWGFRPKRLNFKLFNIQVKEVTDNNGVKTIANNLTSTVQVFTDSDYQLPYVLGSAHEGCLPPFPADVFMIPQYGYLTLNDGSQAVGRSSFYCLEYFPSQMLRTGNNFQFSYEFENVPFHSSYAHSQSLDRLMNPLIDQYLYYLSKTINGSGQNQQTLKFSVAGPSNMAVQGRNYIPGPSYRQQRVSTTVTQNNNSEFAWPGASSWALNGRNSLMNPGPAMASHKEGEDRFFPLSGSLISGKQGTGRDNVDANKVMITNEEEIKTTNPVATESYGQVATNHQSAQAQAQTGWVQNQGILPGMVWQDRDVYLQGPIWAKIPHTDGNFHPSPLMGGFEMKHPPPQILIKNTPVPADPPTAFNKDKLNSFITQYSTGQVSVEIEWELQKENSKRWNPEIQYTSNYYKSNNVEFAVNTEGVYSEPRPIGTRYLTRNL

SEQ ID NO: 816 - DNA, 2208 bp, Artificial Sequence
  Description of Artificial Sequence: Synthetic polynucleotide
atggctgccgatggttatcttccagattggctcgaggacaaccttagtgaaggaattcgcgagtggtgggctttgaaacctggagcccctcaacccaaggcaaatcaacaacatcaagacaacgctcgaggtcttgtgcttccgggttacaaataccttggacccggcaacggactcgacaagggggagccggtcaacgcagcagacgcggcggccctcgagcacgacaaggcctacgaccagcagctcaaggccggagacaacccgtacctcaagtacaaccacgccgacgccgagttccaggagcggctcaaagaagatacgtcttttgggggcaacctcgggcgagcagtcttccaggccaaaaagaggcttcttgaacctcttggtctggttgaggaagcggctaagacggctcctggaaagaagaggcctgtagagcagtctcctcaggaaccggactcctccgcgggtattggcaaatcgggtgcacagcccgctaaaaagagactcaatttcggtcagactggcgacacagagtcagtcccagaccctcaaccaatcggagaacctcccgcagccccctcaggtgtgggatctcttacaatagcttcaggtggtggcgcaccagtggcagacaataacgaaggtgccgatggagtgggtagttcctcgggaaattggcattgcgattcccaatggctgggggacagagtcatcaccaccagcacccgaacctgggccctgcccacctacaacaatcacctctacaagcgaatctccaacagcacatctggaggatcttcaaatgacaacgcctacttcggctacagcaccccctgggggtattttgacttcaacagattccactgccacttctcaccacgtgactggcagcgactcatcaacaacaactggggattccggcctaagcgactcaacttcaagcttttcaacattcgggtcaaagaggttacggacaacaatggagtcaagaccatcaccaataaccttaccagcacggtccaggtcttcacggactcagactatcagctcccgtacgtgcttgggtcggctcacgagggctgcctcccgccgttcccagcggacgttttcatgattcctcagtacgggtatctgacgcttaatgatggaagccaggccgtgggtcgttcgtccttttactgcctggaatatttcccgtcgcaaatgctaagaacgggtaacaacttccagttcagctacgagtttgagaacgtacctttccatagcagctacgctcacagccaaagcctggaccgactaatgaatccactcatcgaccaatacttgtactatctctcaaagactattaacggttctggacagaatcaacaaacgctaaaattcagtgtggccggacccagcaacatggctgtccagggaagaaactacatacctggacccagctaccgacaacaacgtgtctcaaccactgtgactcgaaacaacaacagcgaatttgcttggcctggagcttcttcttgggctctcaatggacgtaatagcttgatgaatcctggacctgctatggccagccacaaagaaggagaggaccgtttctttcctttgtctggatctttaatttttggcaaacaaggaactggaagagacaacgtggatgcggacaaagtcatgataaccaacgaagaagaaattaaaactactaacccggtagcaacggagtcctatggacaagtggccacaaaccaccagagtgcccaagcacaggcgcagaccggctgggttcaaaaccaaggaatacttccgggtatggtttggcaggacagagatgtgtacctgcaaggacccatttgggccaaaattcctcacacggacggcaactttcacccttctccgctgatgggagggtttggagtgaagcacccgcctcctcagatcctcatcaaaaacacacctgtacctgcggatcctccaacggccttcaacaaggacaagctgaactctttcatcacccagtattctactggccaagtcagcgtggagatcgagtgggagctgcagaaggaaaacagcaagcgctggaacccggagatccagtacacttccaactattacaagtctaataatgttgaatttgctgttaatactgaaggtgtatatagtgaaccccgccccattggcaccagatacctgactcgtaatctg

SEQ ID NO: 817 - protein, 736 aa, Artificial Sequence
  Description of Artificial Sequence: Synthetic polypeptide
MAADGYLPDWLEDNLSEGIREWWALKPGAPQPKANQQHQDNARGLVLPGYKYLGPGNGLDKGEPVNAADAAALEHDKAYDQQLKAGDNPYLKYNHADAEFQERLKEDTSFGGNLGRAVFQAKKRLLEPLGLVEEAAKTAPGKKRPVEQSPQEPDSSAGIGKSGAQPAKKRLNFGQTGDTESVPDPQPIGEPPAAPSGVGSLTIASGGGAPVADNNEGADGVGSSSGNWHCDSQWLGDRVITTSTRTWALPTYNNHLYKRISNSTSGGSSNDNAYFGYSTPWGYFDFNRFHCHFSPRDWQRLINNNWGFRPKRLNFKLFNIRVKEVTDNNGVKTITNNLTSTVQVFTDSDYQLPYVLGSAHEGCLPPFPADVFMIPQYGYLTLNDGSQAVGRSSFYCLEYFPSQMLRTGNNFQFSYEFENVPFHSSYAHSQSLDRLMNPLIDQYLYYLSKTINGSGQNQQTLKFSVAGPSNMAVQGRNYIPGPSYRQQRVSTTVTRNNNSEFAWPGASSWALNGRNSLMNPGPAMASHKEGEDRFFPLSGSLIFGKQGTGRDNVDADKVMITNEEEIKTTNPVATESYGQVATNHQSAQAQAQTGWVQNQGILPGMVWQDRDVYLQGPIWAKIPHTDGNFHPSPLMGGFGVKHPPPQILIKNTPVPADPPTAFNKDKLNSFITQYSTGQVSVEIEWELQKENSKRWNPEIQYTSNYYKSNNVEFAVNTEGVYSEPRPIGTRYLTRNL

SEQ ID NO: 818 - DNA, 2208 bp, Artificial Sequence
  Description of Artificial Sequence: Synthetic polynucleotide
atggctgccgatggttatcttccagattggctcgaggacaaccttagtgaaggaattcgcgagtggtgggctttgaaacctggagcccctcaacccaaggcaaatcaacaacatcaagacaacgctcgaggtcttgtgcttccgggttacaaataccttggacccggcaacggactcgacaagggggagccggtcaacgcagcagacgcggcggccctcgagcacgacaaggcctacgaccagcagctcaaggccggagacaacccgtacctcaagtacaaccacgccgacgccgagttccaggagcggctcaaagaagatacgtcttttgggggcaacctcgggcgagcagtcttccaggccaaaaagaggcttcttgaacctcttggtctggttgaggaagcggctaagacggctcctggaaagaagaggcctgtagagcagtctcctcaggaaccggactcctccgcgggtattggcaaatcgggcgcacagcccgctaaaaagagactcaatttcggtcagactggcgacacagagccagtcccagaccctcaaccaatcggagaacctcccgcagccccctcaggtgtgggatctcttacaatggcttcaggtggtggcgcaccagtggcagacaataacgaaggtgccgatggagtgggtagttcctcgggaaattggcattgcgattcccaatggctgggggacagagtcatcaccaccagcacccgaacctgggccctgcccacctacaacaatcacctctacaagcaaatctccaacagcacatctggaggatcttcaaatgacaacgcctacttcggctacagcaccccctgggggtattttgacttcaacagattccactgccacttctcaccacgtgactggcagcgactcatcaacaacaactggggattccggcctaagcgactcaacttcaagctcttcaacattcaggtcaaagaggttacggacaacaatggagtcaagaccatcgccaataaccttaccagcacggtccaggtcttcacggactcagactatcagctcccgtacgtgctcgggtcggctcacgagggctgcctcccgccgttcccagcgggcgttttcatgattcctcagtacgggtatctgacgcttaatgatggaagccaggccgtgggtcgttcgtccttttactgcctggaatatttcccgtcgcaaatgctaagaacgggtaacaacttccagttcagctacgagtttgagaacgtacctttccatagcagctacgctcacagccaaagcctggaccgactaatgaatccactcatcgaccaatacttgtactatctctcaaagactattaacggttctggacagaatcaacaaacgctaaaattcagtgtggccggacccagcaacatggctgtccagggaagaaactacatacctggacccagctaccgacaacaacgtgtctcaaccactgcgactcaaaacaacaacagcgaatttgcttggcctggagcttcttcttgggctctcaatggacgtaatagcttgatgaatcctggacctgctatggccagccacaaagaaggagaggaccgtttctttcctttgtctggatctttaatttttggcaaacaaggaactggaagagacaacgtggatgcggacaaagtcatgataaccaacgaagaagaaattaaaactactaacccggtagcaacggagtcctatggacaagtggccacaaaccaccagagtgcccaagcacaggcgcagaccggctgggttcaaaaccaaggaatacttccgggtatggtttggcaggacagagatgtgtacctgcaaggacccatttgggccaaaattcctcacacggacggcaactttcacccttctccgctgatgggagggtttggaatgaagcacccgcctcctcagatcctcatcaaaaacacacctgtacctgcggatcctccaacggccttcaacaaggacaagctgaactctttcatcacccagtattctactggccaagtcagcgtggagatcgagtgggagctgcagaaggaaaacagcaagcgctggaacccggagatccagtacacttccaactattacaagtctaataatgttgaatttgctgttaatactgaaggtgtatatagtgaaccccgccccattggcaccagatacctgactcgtaatctg

SEQ ID NO: 819 - protein, 736 aa, Artificial Sequence
  Description of Artificial Sequence: Synthetic polypeptide
MAADGYLPDWLEDNLSEGIREWWALKPGAPQPKANQQHQDNARGLVLPGYKYLGPGNGLDKGEPVNAADAAALEHDKAYDQQLKAGDNPYLKYNHADAEFQERLKEDTSFGGNLGRAVFQAKKRLLEPLGLVEEAAKTAPGKKRPVEQSPQEPDSSAGIGKSGAQPAKKRLNFGQTGDTEPVPDPQPIGEPPAAPSGVGSLTMASGGGAPVADNNEGADGVGSSSGNWHCDSQWLGDRVITTSTRTWALPTYNNHLYKQISNSTSGGSSNDNAYFGYSTPWGYFDFNRFHCHFSPRDWQRLINNNWGFRPKRLNFKLFNIQVKEVTDNNGVKTIANNLTSTVQVFTDSDYQLPYVLGSAHEGCLPPFPAGVFMIPQYGYLTLNDGSQAVGRSSFYCLEYFPSQMLRTGNNFQFSYEFENVPFHSSYAHSQSLDRLMNPLIDQYLYYLSKTINGSGQNQQTLKFSVAGPSNMAVQGRNYIPGPSYRQQRVSTTATQNNNSEFAWPGASSWALNGRNSLMNPGPAMASHKEGEDRFFPLSGSLIFGKQGTGRDNVDADKVMITNEEEIKTTNPVATESYGQVATNHQSAQAQAQTGWVQNQGILPGMVWQDRDVYLQGPIWAKIPHTDGNFHPSPLMGGFGMKHPPPQILIKNTPVPADPPTAFNKDKLNSFITQYSTGQVSVEIEWELQKENSKRWNPEIQYTSNYYKSNNVEFAVNTEGVYSEPRPIGTRYLTRNL

SEQ ID NO: 820 - DNA, 2208 bp, Artificial Sequence
  Description of Artificial Sequence: Synthetic polynucleotide
atggctgccgatggttatcttccagattggctcgaggacaaccttagtgaaggaattcgcgagtggtgggctttgaaacctggagcccctcaacccaaggcaaatcaacaacatcaagacaacgctcgaggtcttgtgcttccgggttacaaataccttggacccggcaacggactcgacaagggggagccggtcaacgcagcagacgcggcggccctcgagcacgacaaggcctacgaccagcagctcaaggccggagacaacccgtacctcaagtacaaccacgccgacgccgggttccaggagcggctcaaagaagatacgtcttttgggggcaacctcgggcgagcagtcttccaggccaaaaagaggcttcttgaacctcttggtctggttgaggaagcggctaagacggctcctggaaagaagaggcctgtagagcagtctcctcaggaaccggactcctccgcgggtattggcaaatcgggtgcacagcccgctaaaaagagactcaatttcggtcagactggcgacacagagtcagtcccagtccctcaaccaatcggagaacctcccgcagccccctcaggtgtgggatctcttacaatggcttcaggtggtggcgcaccagtggcagacaataacgaaggtgccgatggagtgggtagttcctcgggaaattggcattgcgattcccaatggctgggggacagagtcatcaccaccagcacccgaacctgggccctgcccacctacaacaatcacctctacaagcaaatctccaacagcacatctggaggatcttcaaatgacaacgcctacttcggctacagcaccccctgggggtattttgacttcaacagattccactgccacttctcaccacgtgactggcagcgactcatcaacaacaactggggattccggcctaagcgactcaacttcaagctcttcaacattcaggtcaaagaggttacggacaacaatggagtcaagaccatcgccaataaccttaccagcacggtccaggtcttcacggactcagactatcagctcccgtacgtgctcgggtcggctcacgagggctgcctcccgccgttcccagcggacgttttcatgattcctcagtacgggtatctgacgcttaatgatggaagccaggccgtgggtcgttcgtccttttactgcctggaatatttcccgtcgcaaatgctaagaacgggtaacaacttccagttcagctacgagtttgagaacgtacctttccatagcagctacgctcacagccaaagcctggaccgactaatgaatccactcatcgaccaatacttgtactatctctcaaagactattaacggttctggacagaatcaacaaacgctaaaattcagtgtggccggacccagcaacatggctgtccagggaagaaactacatacctggacccagctaccgacaacaacgtgtctcaaccactgtgactcaaaacaacaacagcgaatttgcttggcctggagcttcttcttgggctctcaatggacgtaatagcttgatgaatcctggacctgctatggccagccacaaagaaggagaggaccgtttctttcctttgtctggatctttaatttttggcaaacaaggagctggaagagacaacgtggatgcggacaaagtcatgataaccaacgaagaagaaattaaaactactaacccggtagcaacggagtcctatggacaagtggccacaaaccaccagagtgcccaagcacaggcgcagaccggctgggttcaaaaccaaggaatacttccgggtatggtttggcaggacagagatgtgtacctgcaaggacccatttgggccaaaattcctcacacggacggcaactttcacccttctccgctgatgggagggtttggaatgaagcacccgcctcctcagatcctcatcaaaaacacacctgtacctgcggatcctccaacggccttcaacaaggacaagctgaactctttcatcacccagtattctactggccaagtcagcgtggagatcgagtgggagctgcagaaggaaaacagcaagcgctggaacccggagatccagtacacttccaactattacaagtctaataatgttgaatttgctgttaatactgaaggtgtatatagtgaaccccgccccattggcaccagatacctgactcgtaatctg

SEQ ID NO: 821 - protein, 736 aa, Artificial Sequence
  Description of Artificial Sequence: Synthetic polypeptide
MAADGYLPDWLEDNLSEGIREWWALKPGAPQPKANQQHQDNARGLVLPGYKYLGPGNGLDKGEPVNAADAAALEHDKAYDQQLKAGDNPYLKYNHADAGFQERLKEDTSFGGNLGRAVFQAKKRLLEPLGLVEEAAKTAPGKKRPVEQSPQEPDSSAGIGKSGAQPAKKRLNFGQTGDTESVPVPQPIGEPPAAPSGVGSLTMASGGGAPVADNNEGADGVGSSSGNWHCDSQWLGDRVITTSTRTWALPTYNNHLYKQISNSTSGGSSNDNAYFGYSTPWGYFDFNRFHCHFSPRDWQRLINNNWGFRPKRLNFKLFNIQVKEVTDNNGVKTIANNLTSTVQVFTDSDYQLPYVLGSAHEGCLPPFPADVFMIPQYGYLTLNDGSQAVGRSSFYCLEYFPSQMLRTGNNFQFSYEFENVPFHSSYAHSQSLDRLMNPLIDQYLYYLSKTINGSGQNQQTLKFSVAGPSNMAVQGRNYIPGPSYRQQRVSTTVTQNNNSEFAWPGASSWALNGRNSLMNPGPAMASHKEGEDRFFPLSGSLIFGKQGAGRDNVDADKVMITNEEEIKTTNPVATESYGQVATNHQSAQAQAQTGWVQNQGILPGMVWQDRDVYLQGPIWAKIPHTDGNFHPSPLMGGFGMKHPPPQILIKNTPVPADPPTAFNKDKLNSFITQYSTGQVSVEIEWELQKENSKRWNPEIQYTSNYYKSNNVEFAVNTEGVYSEPRPIGTRYLTRNL

SEQ ID NO: 822 - DNA, 2208 bp, Artificial Sequence
  Description of Artificial Sequence: Synthetic polynucleotide
  misc_feature (377)..(377): n is a, c, g, or t
atggctgccgatggttatcttccagattggctcgaggacaaccttagtgaaggaattcgcgagaggtgggctttgaaacctggagcccctcaacccaaggcaaatcaacaacatcaagacaacgctcgaggtcttgtgcttccgggttacaaataccttggacccggcaacggactcgacaagggggagccggtcaacgcagcagacgcggcggccctcgagcacgacaaggcctacgaccagcagctcaaggccggagacaacccgtacctcaagtacaaccacgccgacgccgagttccaggagcggctcaaagaagatacgtcttttgggggcaacctcgggcgagcagtcttccaggccaaaaagaggcttcntgaacctcttggtctggttgaggaagcggctaagacggctcctggaaagaagaggcctgtagagcagtctcctcaggaaccggactcctccgcgggtattggcaaatcgggtgcacagcccgctaaaaagagactcaatttcggtcagactggcgacacagagtcagtcccagaccctcaaccaatcggagaacctcccgcagccccctcaggtgtgggatctcttacaatggcttcaggtggtggcgcaccagtggcagacaataacgaaggtgccgatggagtgggtagttcctcggggaattggcattgcgattcccaatggctgggggacagagtcatcaccaccagcacccgaacctgggccctgcccacctacaacaatcacctctacaagcaaatctccaacagcacatctggaggatcttcaaatgacaacgcctacttcggctacagcaccccctgggggtattttgacttcaacagattccactgccacttctcaccacgtgactggcagcgactcatcaacaacaactggggattccggcctaagcgactcaacttcaagctcttcaacattcaggtcaaagaggttacggacaacaatggagtcaagaccatcgccaataaccttaccagcacggtccaggtcttcacggactcagactatcagctcccgtacgtgctcgggtcggctcacgagggctgcctcccgccgttcccagcggacgttttcatgattcctcagtacgggtatctgacgcttaatgatggaagccaggccgtgggtcgttcgtccttttactgcctggaatatttcccgtcgcaaatgctaagaacgggtaacaacttccagttcagctacgagtttgagaacgtacctttccatagcagctacgctcacagccaaagcccggaccgactaatgaatccactcatcgaccaatacttgtactatctctcaaagactattaacggttctggacagaatcaacaaacgctaaaattcagtgtggccggacccagcaacatggctgtccagggaagaaactacatacctggacccagctaccgacaacaacgtgtctcaaccactgtgactcaaaacaacaacagcgaatttgcttggcctggagcttcttcttgggctctcaatggacgtaatagcttgatgaatcctggacctgctatggccagccacaaagaaggagaggaccgtttctttcctttgtctggatctttaatttttggcaaacaaggaactggaagagacaacgtggatgcggacaaagtcatgataaccaacgaagaagaaattaaaactactaacccggtagcaacggagtcctatggacaagtggccacaaaccaccagagtgcccaagcacaggcgcagaccggctgggttcaaaaccaaggaatacttccgggtatggtttggcaggacagagatgtgtacctgcaaggacccatttgggccaaaattcctcacacggacggcaactttcacccttctccgctgatgggagggtttggagtgaagcacccgcctcctcagatcctcatcaaaaacacacctgtacctgcggatcctccaacggccttcaacaaggacaagctgaactctttcatcacccagtattctactggccaagtcagcgtggagatcgagtgggagctgcagaaggaaaacagcaagcgctggaacccggagatccagtacacttccaactattacaagtctaataatgttgaatttgctgttaatactgaaggtgtatatagtgaaccccgccccattggcaccagatacctgactcgtaatctg

SEQ ID NO: 823 - protein, 736 aa, Artificial Sequence
  Description of Artificial Sequence: Synthetic polypeptide
  MOD_RES (126)..(126): Xaa = any naturally occurring amino acid
MAADGYLPDWLEDNLSEGIRERWALKPGAPQPKANQQHQDNARGLVLPGYKYLGPGNGLDKGEPVNAADAAALEHDKAYDQQLKAGDNPYLKYNHADAEFQERLKEDTSFGGNLGRAVFQAKKRLXEPLGLVEEAAKTAPGKKRPVEQSPQEPDSSAGIGKSGAQPAKKRLNFGQTGDTESVPDPQPIGEPPAAPSGVGSLTMASGGGAPVADNNEGADGVGSSSGNWHCDSQWLGDRVITTSTRTWALPTYNNHLYKQISNSTSGGSSNDNAYFGYSTPWGYFDFNRFHCHFSPRDWQRLINNNWGFRPKRLNFKLFNIQVKEVTDNNGVKTIANNLTSTVQVFTDSDYQLPYVLGSAHEGCLPPFPADVFMIPQYGYLTLNDGSQAVGRSSFYCLEYFPSQMLRTGNNFQFSYEFENVPFHSSYAHSQSPDRLMNPLIDQYLYYLSKTINGSGQNQQTLKFSVAGPSNMAVQGRNYIPGPSYRQQRVSTTVTQNNNSEFAWPGASSWALNGRNSLMNPGPAMASHKEGEDRFFPLSGSLIFGKQGTGRDNVDADKVMITNEEEIKTTNPVATESYGQVATNHQSAQAQAQTGWVQNQGILPGMVWQDRDVYLQGPIWAKIPHTDGNFHPSPLMGGFGVKHPPPQILIKNTPVPADPPTAFNKDKLNSFITQYSTGQVSVEIEWELQKENSKRWNPEIQYTSNYYKSNNVEFAVNTEGVYSEPRPIGTRYLTRNL

SEQ ID NO: 824 - DNA, 2208 bp, Artificial Sequence
  Description of Artificial Sequence: Synthetic polynucleotide
atggctgccgatggttatcttccagattggctcgaggacaaccttagtgaaggaattcgcgagtggtgggctttgaaacctggagcccctcaacccaaggcaaatcaacaacatcaagacaacgctcgaggtcttgtgcttccgggttacaaataccttggacccggcaacggactcgacaagggggagccggtcaacgcagcagacgcggcggccctcgagcacgacaaggcctacgaccagcagctcaaggccggagacaacccgtacctcaagtacaaccacgccgacgccgagttccaggagcggctcaaagaagatacgtcttttgggggcaacctcgggcgagcagtcttccaggccaaaaagaggcttcttgaacctcttggtctggttgaggaagcggctaagacggctcctggaaagaagaggcctgtagagcagtctcctcaggaaccggactcctccgcgggtattggcaaatcgggtgcacagcccgctaaaaagagactcaatttcggtcagactggcgacacagagtcagtcccagaccctcaaccaatcggagaacctcccgcagccccctcaggtgtgggatctcttacaatggcttcaggtggtggcgcaccagtggcagacaataacgaaggtgccgatggagtgggtagttcctcgggaaattggcattgcgattcccaatggctgggggacagagtcatcaccaccagcacccgaacctgggccctgcccacctacaacaatcacctctacaagcaaatctccaacagcacatctggaggatcttcaaatgacaacgcctacctcggctacagcaccccctgggggtattttgacttcaacagattccactgccacttctcaccacgtgactggcagcgactcatcaacaacaactggggattccggcctaagcgactcaacttcaagctcttcaacattcaggtcaaagaggttacggacaacaatggagtcaagaccatcgccaataaccttaccagcacggtccaggtcttcacggactcagactatcagctcccgtacgtgctcgggtcggctcacgagggctgcctcccgccgttcccagcggacgttttcatgattcctcagtacgggtatctgacgcttaatgatggaagccaggccgtgggtcgttcgtccttttactgcctggaatatttcccgtcgcaaatgctaagaacgggtaacaacttccagttcagctacgagtttgagaacgtacctttccatagcagctacgctcacagccaaagcctggaccgactaatgaatccactcatcgaccaatacttgtactatctctcaaagactattaacggttctggacagaatcaacaaacgctaaaattcagtgtggccggacccagcaacatggctgtccagggaagaaactacatacctggacccagctaccgacaacaacgtgtctcaaccactgtgactcaaaacaacaacagcgaatttgcttggcctggagcttcttcttgggctctcaatggacgtaatagcttgatgaatcctggacctgctatggccagccacaaagaaggagaggaccgtttctttcctttgtctggatctttaatttttggcaaacaaggaactggaagagacaacgtggatgcggacaaagtcatgataaccaacgaagaagaaattaaaactactaacccggtagcaacggagtcctatggacaagtggccacaaaccaccagagtgcccaagcacaggcgcagaccggctgggttcaaaaccaaggaatacttccgggtatggtttggcaggacagagatgtgtacctgcaaggacccatttgggccaaaattcctcacacggacggcaactttcacccttctccgctgatgggagggtttggaatgaagcacccgcctcctcagatcctcatcaaaaacacacctgtacctgcggatcctccaacggccttcaacaaggacaagctgaactctttcatcacccagtattctactggccaagtcagcgtggagatcgagtgggagctgcagaaggaaaacagcaagcgctggaacccggagatccagtacacttccaactattacaagtctaataatgttgaatttgctgttaatactgaaggtgtatatagtgaaccccgccccattggcaccagatacctgactcgtaatctg

SEQ ID NO: 825 - protein, 736 aa, Artificial Sequence
  Description of Artificial Sequence: Synthetic polypeptide
MAADGYLPDWLEDNLSEGIREWWALKPGAPQPKANQQHQDNARGLVLPGYKYLGPGNGLDKGEPVNAADAAALEHDKAYDQQLKAGDNPYLKYNHADAEFQERLKEDTSFGGNLGRAVFQAKKRLLEPLGLVEEAAKTAPGKKRPVEQSPQEPDSSAGIGKSGAQPAKKRLNFGQTGDTESVPDPQPIGEPPAAPSGVGSLTMASGGGAPVADNNEGADGVGSSSGNWHCDSQWLGDRVITTSTRTWALPTYNNHLYKQISNSTSGGSSNDNAYLGYSTPWGYFDFNRFHCHFSPRDWQRLINNNWGFRPKRLNFKLFNIQVKEVTDNNGVKTIANNLTSTVQVFTDSDYQLPYVLGSAHEGCLPPFPADVFMIPQYGYLTLNDGSQAVGRSSFYCLEYFPSQMLRTGNNFQFSYEFENVPFHSSYAHSQSLDRLMNPLIDQYLYYLSKTINGSGQNQQTLKFSVAGPSNMAVQGRNYIPGPSYRQQRVSTTVTQNNNSEFAWPGASSWALNGRNSLMNPGPAMASHKEGEDRFFPLSGSLIFGKQGTGRDNVDADKVMITNEEEIKTTNPVATESYGQVATNHQSAQAQAQTGWVQNQGILPGMVWQDRDVYLQGPIWAKIPHTDGNFHPSPLMGGFGMKHPPPQILIKNTPVPADPPTAFNKDKLNSFITQYSTGQVSVEIEWELQKENSKRWNPEIQYTSNYYKSNNVEFAVNTEGVYSEPRPIGTRYLTRNL

SEQ ID NO: 826 - DNA, 2175 bp, Artificial Sequence
  Description of Artificial Sequence: Synthetic polynucleotide
atgtcttttgttgatcaccctccagattggttggaagaagttggtgaaggtcttcgcgagtttttgggccttgaagcgggcccaccgaaaccaaaacccaatcagcagcatcaagatcaagcccgtggtcttgtgctgcctggttataactatctcggacccggaaacggtctcgatcgaggagagcctgccaacagggcagacgaggtcgcgcgagagcacgacatctcgtacaacgagcagcttgaggcgggagacaacccctacctcaagtacaaccacgcgggcgccgagtttcaggagaagctcgccgacgacacatccttcgggggaaacctcggaaaggcagtctttcaggccaagaaaagggttctcgaaccttttggcctggttgaagagggtgctaagacggcccctaccggaaagcggatagacgaccactttccaaaaagaaagaaggcccggaccgaagaggactccaagccttccacctcgtcagacgccgaagctggacccagcggatcccagcagctgcaaatcccagcccaaccagcctcaagtttgggagctgatacaatgtctgcgggaggtggcggcccattgggcgacaataaccaaggtgccgatggagtgggcaatgcctcgggagattggcattgcgattccacgtggatgggggacagagtcgtcaccaagtccacccgaacctgggtgctgcccggctacaacaaccaccagtaccgagagatcaaaagcggctccgtcgacggaagcaacgccaacgcctactttggatacagcaccccctgggggtactttgactttaaccgcttccacagccactggagcccccgagactggcaaagactcatcaacaactactggggcttcagaccccggtccctcagagtcaaaatcttcaacattcaagtcaaagaggtcacggtgcaggactccaccaccaccatcgccaacaacctcacctccaccgtccaagtgtttacggacgacgactaccagctgccctacgtcgtcggcaacgggaccgagggatgcctgccggccttccctccgcaggtctttacgctgccgcagtacggttacgcgacgctgaaccgcgacaacacagaaaatcccaccgagaggagcagcttcttctgcctagagtactttcccagcaagatgctgagaacgggcaacaactttgagtttacctacaactttgaggaggtgcccttccactccagcttcgctcccagtcagaacctcttcaagctggccaacccgctggtggaccagtacttgtaccgcttcgtgagcacaaataatactggcggagtccagttcaacaagaacctggccgggagatacgccaacacctacaaaaactggttcccggggcccatgggccgaacccagggctggaacctgggctccggggtcaaccgcgccagtgtcagcgccttcgccacgaccaataggatggagctcgagggcgcgagttaccaggtgcccccgcagccgaacggcatgaccaacaacctccagggcagcaacacctatgccctggagaacactatgatcttcaacagccagccggcgaacccgggcaccaccgccacgtacctcgagggcaacatgctcatcaccagcgagagcgagacgcagccggtgaaccgcgtggcgtacaacgtcggcgggcagatggccaccaacaaccagagctccaccactgcccccgcgaccggcacgtacaacctccaggaaatcgtgcccggcagcgtgtggatggagagggacgtgtacctccaaggacccatctgggccaagatcccagagacgggggcgcactttcacccctctccggccatgggcggattcggactcaaacacccaccgcccatgatgctcatcaagaacacgcctgtgcccggaaatatcaccagcttctcggacgtgcccgtcagcagcttcatcacccagtacagcaccgggcaggtcaccgtggagatggagtgggagctcaagaaggaaaactccaagaggtggaacccagagatccagtacacaaacaactacaacgacccccagtttgtggactttgccccggacagcaccggggaatacagaaccaccagacctatcggaacccgataccttacccgacccctttaa

SEQ ID NO: 827 - protein, 724 aa, Artificial Sequence
  Description of Artificial Sequence: Synthetic polypeptide
MSFVDHPPDWLEEVGEGLREFLGLEAGPPKPKPNQQHQDQARGLVLPGYNYLGPGNGLDRGEPANRADEVAREHDISYNEQLEAGDNPYLKYNHAGAEFQEKLADDTSFGGNLGKAVFQAKKRVLEPFGLVEEGAKTAPTGKRIDDHFPKRKKARTEEDSKPSTSSDAEAGPSGSQQLQIPAQPASSLGADTMSAGGGGPLGDNNQGADGVGNASGDWHCDSTWMGDRVVTKSTRTWVLPGYNNHQYREIKSGSVDGSNANAYFGYSTPWGYFDFNRFHSHWSPRDWQRLINNYWGFRPRSLRVKIFNIQVKEVTVQDSTTTIANNLTSTVQVFTDDDYQLPYVVGNGTEGCLPAFPPQVFTLPQYGYATLNRDNTENPTERSSFFCLEYFPSKMLRTGNNFEFTYNFEEVPFHSSFAPSQNLFKLANPLVDQYLYRFVSTNNTGGVQFNKNLAGRYANTYKNWFPGPMGRTQGWNLGSGVNRASVSAFATTNRMELEGASYQVPPQPNGMTNNLQGSNTYALENTMIFNSQPANPGTTATYLEGNMLITSESETQPVNRVAYNVGGQMATNNQSSTTAPATGTYNLQEIVPGSVWMERDVYLQGPIWAKIPETGAHFHPSPAMGGFGLKHPPPMMLIKNTPVPGNITSFSDVPVSSFITQYSTGQVTVEMEWELKKENSKRWNPEIQYTNNYNDPQFVDFAPDSTGEYRTTRPIGTRYLTRPL

SEQ ID NO: 828 - DNA, 2175 bp, Artificial Sequence
  Description of Artificial Sequence: Synthetic polynucleotide
atgtcttttgttgatcaccctccagattggttggaagaagttggtgaaggtcttcgcgagtttttgggccttgaagcgggcccaccgaaaccaaaacccaatcagcagcatcaagatcaagcccgtggtcttgtgctgcctggttataactatctcggacccggaaacggtctcgatcgaggagagcctgtcaacagggcagacgaggtcgcgcgagagcacgacatctcgtacaacgagcagcttgaggcgggagacaacccctacctcaagtacaaccacgcggacgccgagtttcaggagaagctcgccgacgacacatccttcgggggaaacctcggaaaggcagtctttcaggccaagaaaagggttctcgaaccttttggcctggttgaagagggtgctaagacggcccctaccggaaagcggatagacgaccactttccaaaaagaaagaaggcccggaccgaagaggactccaagcctcccacctcgtcagacgccgaagctggacccagcggatcccagcagctgcaaatcccagcccaaccagcctcaagtttgggagctgatacaatgtctgcgggaggtggcggcccattgggcgacaataaccaaggtgccgatggagtgggcaatgcctcgggagattggcattgcgattccacgtggatgggggacagagtcgtcaccaagtccacccgaacctgggtgctgcccagctacaacaaccaccagtaccgagagatcaaaagcggctccgtcgacggaagcaacgccaacgcctactttggatacagcaccccctgggggtactttgactttaaccgcttccacagccactggagcccccgagactggcaaagactcatcaacaactactggggcttcagaccccggtccctcagagtcaaaatcttcaacattcaagtcaaagaggtcacggtgcaggactccgccaccaccatcgccaacaacctcacctccaccgtccaagtgtttacggacgacgactaccagctgccctacgtcgtcggcaacgggaccgagggatgcctgccggccttccctccgcaggtctttacgctgccgcagtacggttacgcgacgctgaaccgcgacaacacagaaaatcccaccgagaggagcagcttcttctgcctagagtactttcccagcaagatgctgagaacgggcaacaactttgagtttacctacaactttgaggaggtgcccttccactccagcttcgctcccagtcagaacctcttcaagctggccaacccgctggtggaccagtacttgtaccgcttcgtgagcacaaataacactggcggagtccagttcaacaagaacctggccgggagatacgccaacacctacaaaaactggttcccggggcccatgggccgaacccagggctggaacctgggctccggggtcaaccgcgccagtgtcagcgccttcgccacgaccaataggatggagctcgagggcgcgagttaccaggtgcccccgcagccgaacggcatgaccaacaacctccagggcagcaacacctatgccctggagaacactatgatcttcaacagccagccggcgaacccgggcaccaccgccacgtacctcgagggcaacatgctcatcaccagcgagagcgagacgcagccggtgaaccgcgtggcgtacaacgtcggcgggcagatggccaccaacaaccagagctccaccactgcccccgcgaccggcacgtacaacctccaggaaatcgtgcccggcagcgtgtggatggagagggacgtgtacctccaaggacccatctgggccaagatcccagagacgggggcgcactttcacccctctccggccatgggcggattcggactcaaacacccaccgcccatgatgctcatcaagaacacgcctgtgcccggaaatatcaccagcttctcggacgtgcccgtcagcagcttcatcacccagtacagcaccgggcaggtcaccgtggagatggagtgggagctcaagaaggaaaactccaagaggtggaacccagagatccagtacacaaacaactacaacgacccccagtttgtggactttgccccggacagcaccggggaatacagaaccaccagacctatcggaacccgataccttacccgacccctttaa

SEQ ID NO: 829 - protein, 724 aa, Artificial Sequence
  Description of Artificial Sequence: Synthetic polypeptide
MSFVDHPPDWLEEVGEGLREFLGLEAGPPKPKPNQQHQDQARGLVLPGYNYLGPGNGLDRGEPVNRADEVAREHDISYNEQLEAGDNPYLKYNHADAEFQEKLADDTSFGGNLGKAVFQAKKRVLEPFGLVEEGAKTAPTGKRIDDHFPKRKKARTEEDSKPPTSSDAEAGPSGSQQLQIPAQPASSLGADTMSAGGGGPLGDNNQGADGVGNASGDWHCDSTWMGDRVVTKSTRTWVLPSYNNHQYREIKSGSVDGSNANAYFGYSTPWGYFDFNRFHSHWSPRDWQRLINNYWGFRPRSLRVKIFNIQVKEVTVQDSATTIANNLTSTVQVFTDDDYQLPYVVGNGTEGCLPAFPPQVFTLPQYGYATLNRDNTENPTERSSFFCLEYFPSKMLRTGNNFEFTYNFEEVPFHSSFAPSQNLFKLANPLVDQYLYRFVSTNNTGGVQFNKNLAGRYANTYKNWFPGPMGRTQGWNLGSGVNRASVSAFATTNRMELEGASYQVPPQPNGMTNNLQGSNTYALENTMIFNSQPANPGTTATYLEGNMLITSESETQPVNRVAYNVGGQMATNNQSSTTAPATGTYNLQEIVPGSVWMERDVYLQGPIWAKIPETGAHFHPSPAMGGFGLKHPPPMMLIKNTPVPGNITSFSDVPVSSFITQYSTGQVTVEMEWELKKENSKRWNPEIQYTNNYNDPQFVDFAPDSTGEYRTTRPIGTRYLTRPL

SEQ ID NO: 830 - DNA, 2175 bp, Artificial Sequence
  Description of Artificial Sequence: Synthetic polynucleotide
atgtcttttgttgatcaccctccagattggttggaagaagttggtgaaggtcttcgcgagtttttgggccttgaagcgggcccaccgaaaccaaaacccaatcagcagcatcaagatcaagcccgtggtcttgtgctgcctggttataactatctcggacccggaaacggtctcgatcgaggagagcctgtcaacagggcagacgaggtcgcgcgagagcacgacatctcgtacaacgagcagcttgaggcgggagacaacccctacctcaagtacaaccacgcggacgccgagtttcaggagaagctcgccgacgacacatccttcgggggaaacctcggaaaggcagtctttcaggccaagaaaagggttctcgaaccttttggcctggttgaagagggtgctaagacggcccctaccggaaagcggatagacgaccactttccaaaaagaaagaaggcccggaccgaagaggactccaagccttccacctcgtcagacgccgaagctggacccagcggatcccagcagccgcaaatcccagcccaaccagcctcaagtttgggagctgatacaatgtctgcgggaggtggcggcccattgggcgacaataaccaaggtgccgatggagtgggcaatgcctcgggagattggcattgcgattccacgtggatgggggacagagtcgtcaccaagtccacccgaacctgggtgctgcccagctacaacaaccaccagtaccgagagatcaaaagcggctccgtcgacggaagcaacgccaacgcctactttggatacagcaccccctgggggtactttgactttaaccgcttccacagccactggagcccccgagactggcaaagactcatcaacaactactggggcttcagaccccggtccctcagagtcaaaatcttcaacattcaagtcaaagaggtcacggtgcaggactccaccaccaccatcgccaacaacctcacctccaccgtccaagtgtttacggacgacgactaccagctgccctacgtcgtcggcaacgggaccgagggatgcctgccggccttccctccgcaggtctttacgctgccgcagtacggttacgcgacgctgaaccgcgacaacacagaaaatcccaccgagaggagcagcttcttctgcctagagtactttcccagcaagatgctgagaacgggcaacaactttgagtttacctacaactttgaggaggtgcccttccactccagcttcgctcccagtcagaacctcttcaagctggccaacccgctggtggaccagtacttgtaccgcttcgtgagcacaaataacactggcggagtccagttcaacaagaacctggccgggagatacgccaacacctacaaaaactggttcccggggcccatgggccgaacccagggctggaacctgggctccggggtcaaccgcgccagtgtcagcgccttcgccacgaccaataggatggagctcgagggcgcgagttaccaggtgcccccgcagccgaacggcatgaccaacaacctccagggcagcaacacctatgccctggagaacactatgatcttcaacagccagccggcgaacccgggcaccaccgccacgtacctcgagggcaacatgctcatcaccagcgagagcgagacgcagccggtgaaccgcgtggcgtacaacgtcggcgggcagatggccaccaacaaccagagctccaccactgcccccgcgaccggcacgtacaacctccaggaaatcgtgcccggcagcgtgtggatggagagggacgtgtacctccaaggacccatctgggccaagatcccagagacgggggcgcactttcacccctctccggccatgggcggattcggactcaaacacccaccgcccatgatgctcatcaagaacacgcctgcgcccggaaatatcaccagcttctcggacgtgcccgtcagcagcttcatcacccagtacagcaccgggcaggtcaccgtggagatggagtgggagctcaagaaggaaaactccaagaggtggaacccagagatccagtacacaaacaactacaacgacccccagtttgtggactttgccccggacagcaccggggaatacagaaccaccagacctatcggaacccgataccttacccgacccctttaa

SEQ ID NO: 831 - protein, 724 aa, Artificial Sequence
  Description of Artificial Sequence: Synthetic polypeptide
MSFVDHPPDWLEEVGEGLREFLGLEAGPPKPKPNQQHQDQARGLVLPGYNYLGPGNGLDRGEPVNRADEVAREHDISYNEQLEAGDNPYLKYNHADAEFQEKLADDTSFGGNLGKAVFQAKKRVLEPFGLVEEGAKTAPTGKRIDDHFPKRKKARTEEDSKPSTSSDAEAGPSGSQQPQIPAQPASSLGADTMSAGGGGPLGDNNQGADGVGNASGDWHCDSTWMGDRVVTKSTRTWVLPSYNNHQYREIKSGSVDGSNANAYFGYSTPWGYFDFNRFHSHWSPRDWQRLINNYWGFRPRSLRVKIFNIQVKEVTVQDSTTTIANNLTSTVQVFTDDDYQLPYVVGNGTEGCLPAFPPQVFTLPQYGYATLNRDNTENPTERSSFFCLEYFPSKMLRTGNNFEFTYNFEEVPFHSSFAPSQNLFKLANPLVDQYLYRFVSTNNTGGVQFNKNLAGRYANTYKNWFPGPMGRTQGWNLGSGVNRASVSAFATTNRMELEGASYQVPPQPNGMTNNLQGSNTYALENTMIFNSQPANPGTTATYLEGNMLITSESETQPVNRVAYNVGGQMATNNQSSTTAPATGTYNLQEIVPGSVWMERDVYLQGPIWAKIPETGAHFHPSPAMGGFGLKHPPPMMLIKNTPAPGNITSFSDVPVSSFITQYSTGQVTVEMEWELKKENSKRWNPEIQYTNNYNDPQFVDFAPDSTGEYRTTRPIGTRYLTRPL

SEQ ID NO: 832 - DNA, 2175 bp, Artificial Sequence
  Description of Artificial Sequence: Synthetic polynucleotide
atgtcttttgttgatcaccctccagattggttggaagaagttggtgaaggtcttcgcgagtttttgggccttgaagcgggcccaccgaaaccaaaacccaatcagcagcatcaagatcaagcccgtggtcttgtgctgcctggttataactatctcggacccggaaacggtctcgatcgaggagagcctgtcaacagggcagacgaggtcgcgcgagagcacgacatctcgtacaacgagcagcttgaggcgggagacaacccctacctcaagtacaaccacgcggacgccgagtttcaggagaagctcgccgacgacacatccttcgggggaaacctcggaaaggcagtctttcaggccaagaaaagggttctcgaaccttttggcctggttgaagagggtgctaagacggcccctaccggaaagcggatagacgaccactttccaaaaagaaagaaggcccggaccgaagaggactccaagcctcccacctcgtcagacgccgaagctggacccagcggatcccagcagctgcaaatcccagcccaaccagcctcaagtttgggagctgatacaatgtctgcgggaggtggcggcccattgggcgacaataaccaaggtgccgatggagtgggcaatgcctcgggagattggcattgcgattccacgtggatgggggacagagtcgtcaccaagtccacccgaacctgggtgctgcccagctacaacaaccaccagtaccgagagatcaaaagcggctccgtcgacggaagcaacgccaacgcctactttggatacagcaccccctgggggtactttgactttaaccgcttccacagccactggagcccccgagactggcaaagactcatcaacaactactggggcttcagaccccggtccctcagagtcaaaatcttcaacattcaagtcaaagaggtcacggtgcaggactccaccaccaccatcgccaacaacctcacctccaccgtccaagtgtttacggacgacgactaccagctgccctacgtcgtcggcaacgggaccgagggatgcctgccggccttccctccgcaggtctttacgctgccgcagtacggttacgcgacgctgaaccgcgacaacacagaaaatcccaccgagaggagcagcttcttctgcctagagtactttcccagcaagatgctgagaacgggcaacaactttgagtttacctacaactttgaggaggtgcccttccactccagcttcgctcccagtcagaacctcttcaagctggccaacccgctggtggaccagtacttgtaccgcttcgtgagcacaaataacactggcggagtccagttcaacaagaacctggccgggagatacgccaacacctacaaaaactggttcccggggcccatgggccgaacccagggctggaacctgggctccggggtcaaccgcgccagtgtcagcgccttcgccacgaccaataggatggagctcgagggcgcgagttaccaggtgcccccgcagccgaacggcatgaccaacaacctccagggcagcaacacctatgccctggagaacactatgatcttcaacagccagccggcgaacccgggcaccaccgccacgtacctcgagggcaacatgctcatcaccagcgagagcgagacgcagccggtgaaccgcgtggcgtacaacgtcggcgggcagatggccaccaacaaccagagctccaccactgcccccgcgaccggcacgtacaacctccaggaaatcgtgcccggcagcgtgtggatggagagggacgtgtacctccaaggacccatctgggccaagatcccagagacgggggcgcactttcacccctctccggccatgggcggattcggactcaaacacccaccgcccatgatgctcatcaagaacacgcctgtgcccggaaatatcaccagcttctcggacgtgcccgtcagcagcttcatcacccagtacagcaccgggcaggtcaccgtggagatggagtgggagctcaagaaggaaaactccaagaggtggaacccagagatccagtacacaaacaactacaacgacccccagtttgtggactttgccccggacagcaccggggaatacagaaccaccagacctatcggaacccgataccttacccgacccctttaa

SEQ ID NO: 833 - protein, 724 aa, Artificial Sequence
  Description of Artificial Sequence: Synthetic polypeptide
MSFVDHPPDWLEEVGEGLREFLGLEAGPPKPKPNQQHQDQARGLVLPGYNYLGPGNGLDRGEPVNRADEVAREHDISYNEQLEAGDNPYLKYNHADAEFQEKLADDTSFGGNLGKAVFQAKKRVLEPFGLVEEGAKTAPTGKRIDDHFPKRKKARTEEDSKPPTSSDAEAGPSGSQQLQIPAQPASSLGADTMSAGGGGPLGDNNQGADGVGNASGDWHCDSTWMGDRVVTKSTRTWVLPSYNNHQYREIKSGSVDGSNANAYFGYSTPWGYFDFNRFHSHWSPRDWQRLINNYWGFRPRSLRVKIFNIQVKEVTVQDSTTTIANNLTSTVQVFTDDDYQLPYVVGNGTEGCLPAFPPQVFTLPQYGYATLNRDNTENPTERSSFFCLEYFPSKMLRTGNNFEFTYNFEEVPFHSSFAPSQNLFKLANPLVDQYLYRFVSTNNTGGVQFNKNLAGRYANTYKNWFPGPMGRTQGWNLGSGVNRASVSAFATTNRMELEGASYQVPPQPNGMTNNLQGSNTYALENTMIFNSQPANPGTTATYLEGNMLITSESETQPVNRVAYNVGGQMATNNQSSTTAPATGTYNLQEIVPGSVWMERDVYLQGPIWAKIPETGAHFHPSPAMGGFGLKHPPPMMLIKNTPVPGNITSFSDVPVSSFITQYSTGQVTVEMEWELKKENSKRWNPEIQYTNNYNDPQFVDFAPDSTGEYRTTRPIGTRYLTRPL

SEQ ID NO: 834 - DNA, 2175 bp, Artificial Sequence
  Description of Artificial Sequence: Synthetic polynucleotide
atgtcttttgttgatcaccctccagattggttggaagaagttggtgaaggtcttcgcgagtttttgggccttgaagcgggcccaccgaaaccaaaacccaatcagcagcatcaagatcaagcccgtggtcttgtgctgcctggttataactatctcggacccggaaacggtctcgatcgaggagagcctgtcaacagggcagacgaggtcgcgcgagagcacgacatctcgtacaacgagcagcttgaggcgggagacaacccctacctcaagtacaaccacgcggacgccgagtttcaggagaagctcgccgacgacacatccttcgggggaaacctcggaaaggcagtctttcaggccaagaaaagggttctcgaaccttttggcctggttgaagagggtgctaagacggcccctaccggaaagcggatagacgaccactttccaaaaagaaagaaggcccggaccgaagaggactccaagcctcccacctcgtcagacgccgaagctggacccagcggatcccagcagctgcaaatcccagcccaaccagcctcaagtttgggagctgatacaatgtctgcgggaggtggcggcccattgggcgacaataaccaaggtgccgatggagtgggcaatgcctcgggagattggcattgcgattccacgtggatgggggacagagtcgtcaccaagtccacccgaacctgggtgccgcccagctacaacaaccaccagtaccgagagatcaaaagcggctccgtcgacggaagcaacgccaacgcctactttggatacagcaccccctgggggtactttgactttaaccgcttccacagccactggagcccccgagactggcaaagactcatcaacaactactggggcttcagaccccggtccctcagagtcaaaatcttcaacattcaagtcaaagaggtcacggtgcaggactccaccaccaccatcgccaacaacctcacctccaccgtccaagtgtttacggacgacgactaccagctgccctacgtcgtcggcaacgggaccgagggatgcctgccggccttccctccgcaggtctttacgctgccgcagtacggttacgcgacgctgaaccgcgacaacacagaaaatcccaccgagaggagcagcttcttctgcctagagtactttcccagcaagatgctgagaacgggcaacaactttgagtttacctacaactttgaggaggtgcccttccactccagcttcgctcccagtcagaacctcttcaagctggccaacccgctggtggaccagtacttgtaccgcttcgtgagcacaaataacactggcggagtccagttcaacaagaacctggccgggagatacgccaacacctacaaaaactggttcccggggcccatgggccgaacccagggctggaacctgggctccggggtcaaccgcgccagtgtcagcgccttcgccacgaccaataggatggagctcgagggcgcgagttaccaggtgcccccgcagccgaacggcatgaccaacaacctccagggcagcaacacctatgccctggagaacactatgatcttcaacagccagccggcgaacccgggcaccaccgccacgtacctcgagggcaacatgctcatcaccagcgagagcgagacgcagccggtgaaccgcgtggcgtacaacgtcggcgggcagatggccaccaacaaccagagctccaccactgcccccgcgaccggcacgtacaacctccaggaaatcgtgcccggcagcgtgtggatggagagggacgtgtacctccaaggacccatctgggccaagatcccagagacgggggcgcactttcacccctctccggccatgggcggattcggactcaaacacccaccgcccatgatgctcatcaagaacacgcctgtgcccggaaatatcaccagcttctcggacgtgcccgtcagcagcttcatcacccagtacagcaccgggcaggtcgccgtggagatggagtgggagctcaagaaggaaaactccaagaggtggaacccagagatccagtacacaaacaactacaacgacccccagtttgtggactttgccccggacagcaccggggaatacagaaccaccagacctatcggaacccgataccttacccgacccctttaa

SEQ ID NO: 835 - protein, 724 aa, Artificial Sequence
  Description of Artificial Sequence: Synthetic polypeptide
MSFVDHPPDWLEEVGEGLREFLGLEAGPPKPKPNQQHQDQARGLVLPGYNYLGPGNGLDRGEPVNRADEVAREHDISYNEQLEAGDNPYLKYNHADAEFQEKLADDTSFGGNLGKAVFQAKKRVLEPFGLVEEGAKTAPTGKRIDDHFPKRKKARTEEDSKPPTSSDAEAGPSGSQQLQIPAQPASSLGADTMSAGGGGPLGDNNQGADGVGNASGDWHCDSTWMGDRVVTKSTRTWVPPSYNNHQYREIKSGSVDGSNANAYFGYSTPWGYFDFNRFHSHWSPRDWQRLINNYWGFRPRSLRVKIFNIQVKEVTVQDSTTTIANNLTSTVQVFTDDDYQLPYVVGNGTEGCLPAFPPQVFTLPQYGYATLNRDNTENPTERSSFFCLEYFPSKMLRTGNNFEFTYNFEEVPFHSSFAPSQNLFKLANPLVDQYLYRFVSTNNTGGVQFNKNLAGRYANTYKNWFPGPMGRTQGWNLGSGVNRASVSAFATTNRMELEGASYQVPPQPNGMTNNLQGSNTYALENTMIFNSQPANPGTTATYLEGNMLITSESETQPVNRVAYNVGGQMATNNQSSTTAPATGTYNLQEIVPGSVWMERDVYLQGPIWAKIPETGAHFHPSPAMGGFGLKHPPPMMLIKNTPVPGNITSFSDVPVSSFITQYSTGQVAVEMEWELKKENSKRWNPEIQYTNNYNDPQFVDFAPDSTGEYRTTRPIGTRYLTRPL

SEQ ID NO: 836 - DNA, 2175 bp, Artificial Sequence
  Description of Artificial Sequence: Synthetic polynucleotide
atgtcttttgttgatcaccctccagattggttggaagaagttggtgaaggtcttcgcgagtttttgggccttgaagcgggcccaccgaaaccaaaacccaatcagcagcatcaagatcaagcccgtggtcttgtgctgcctggttataactatctcggacccggaaacggtctcgatcgaggagagcctgtcaacagggcagacgaggtcgcgcgagagcacgacatctcgtacaacgagcagcttgaggcgggagacaacccctacctcaagtacaaccacgcggacgccgagtttcaggagaagctcgccgacgacacatccttcgggggaaacctcggaaaggcagtctttcaggccaagaaaagggttctcgaaccttttggcctggttgaagagggtgctaagacggcccctaccggaaagcggatagacgaccactttccaaaaagaaagaaggcccggaccgaagaggactccaagccttccacctcgtcagacgccgaagctggacccagcggatcccagcagctgcaaatcccagcccaaccagcctcaagtttgggagctgatacaatgtctgcgggaggtggcggcccattgggcgacaataaccaaggtgccgatggagtgggcaatgcctcgggagattggcattgcgattccacgtggatgggggacagagtcgtcaccaagtccacccgaacctgggtgctgcccagctacaacaaccaccagtaccgagagatcaaaagcggctccgtcgacggaagcaacgccaacgcctactttggatacagcaccccctgggggtactttgactttaaccgcttccacagccactggagcccccgagactggcaaagactcatcaacaactactggggcttcagaccccggtccctcagagtcaaaatcttcaacattcaagtcaaagaggtcacggtgcaggactccaccaccaccatcgccaacaacctcacctccaccgtccaagtgtttacggacgacgactaccagctgccctacgtcgtcggcaacgggaccgagggatgcctgccggccttccctccgcaggtctttacgctgccgcagtacggttacgcgacgctgaaccgcgacaacacagaaaatcccaccgagaggagcagcttcttctgcctagagtactttcccagcaagatgctgagaacgggcaacaactttgagtttacctacaactttgaggaggtgcccttccactccagcttcgctcccagtcagaacctcttcaagctggccaacccgctggtggaccagtacttgtaccgcttcgtgagcacaaataacactggcggagtccagttcaacaagaacctggccgggagatacgccaacacctacaaaaactggttcccggggcccatgggccgaacccagggctggaacctgggctccggggtcaaccgcgccagtgtcagcgccttcgccacgaccaataggatggagctcgagggcgcgagttaccaggtgcccccgcagccgaacggcatgaccaacaacctccagggcagcaacacctatgccctggagaacactatgatcttcaacagccagccggcgaacccgggcaccaccgccacgtacctcgagggcaacatgctcatcaccagcgagagcgagacgcagccggtgaaccgcgtggcgtacaacgtcggcgggcagatggccaccaacaaccagagctccaccactgcccccgcgaccggcacgtacaacctccaggaaatcgtgcccggcagcgtgtggatggagagggacgtgtacctccaaggacccatctgggccaagatcccagagacgggggcgcactttcacccctctccggccatgggcggattcggactcaaacacccaccgcccatgatgctcatcaagaacacgcctgcgcccggaaatatcaccagcttctcggacgtgcccgtcagcagcttcatcacccagtacagcaccgggcaggtcaccgtggagatggagtgggagctcaagaaggaaaactccaagaggtggaacccagagatccagtacacaaacaactacaacgacccccagtttgtggactttgccccggacagcaccggggaatacagaaccaccagacctatcggaacccgataccttacccgacccctttaa

SEQ ID NO: 837 - protein, 724 aa, Artificial Sequence
  Description of Artificial Sequence: Synthetic polypeptide
MSFVDHPPDWLEEVGEGLREFLGLEAGPPKPKPNQQHQDQARGLVLPGYNYLGPGNGLDRGEPVNRADEVAREHDISYNEQLEAGDNPYLKYNHADAEFQEKLADDTSFGGNLGKAVFQAKKRVLEPFGLVEEGAKTAPTGKRIDDHFPKRKKARTEEDSKPSTSSDAEAGPSGSQQLQIPAQPASSLGADTMSAGGGGPLGDNNQGADGVGNASGDWHCDSTWMGDRVVTKSTRTWVLPSYNNHQYREIKSGSVDGSNANAYFGYSTPWGYFDFNRFHSHWSPRDWQRLINNYWGFRPRSLRVKIFNIQVKEVTVQDSTTTIANNLTSTVQVFTDDDYQLPYVVGNGTEGCLPAFPPQVFTLPQYGYATLNRDNTENPTERSSFFCLEYFPSKMLRTGNNFEFTYNFEEVPFHSSFAPSQNLFKLANPLVDQYLYRFVSTNNTGGVQFNKNLAGRYANTYKNWFPGPMGRTQGWNLGSGVNRASVSAFATTNRMELEGASYQVPPQPNGMTNNLQGSNTYALENTMIFNSQPANPGTTATYLEGNMLITSESETQPVNRVAYNVGGQMATNNQSSTTAPATGTYNLQEIVPGSVWMERDVYLQGPIWAKIPETGAHFHPSPAMGGFGLKHPPPMMLIKNTPAPGNITSFSDVPVSSFITQYSTGQVTVEMEWELKKENSKRWNPEIQYTNNYNDPQFVDFAPDSTGEYRTTRPIGTRYLTRPL

SEQ ID NO: 838 - DNA, 2175 bp, Artificial Sequence
  Description of Artificial Sequence: Synthetic polynucleotide
atgtcttttgttgatcaccctccagattggttggaagaagttggtgaaggtcttcgcgagtttttgggccttgaagcgggcccaccgaaaccaaaacccaatcagcagcatcaagatcaagcccgtggtcttgtgctgcctggttataactatctcggacccggaaacggtctcgatcgaggagagcctgtcaacagggcagacgaggtcgcgcgagagcacgacatctcgtacaacgagcagcttgaggcgggagacaacccctacctcaagtacaaccacgcggacgccgagtttcaggagaagctcgccgacgacacatccttcgggggaaacctcggaaaggcagtctttcaggccaagaaaagggttctcgaaccttttggcctggctgaagagggtgctaagacggcccctaccggaaagcggatagacgaccactttccaaaaagaaagaaggcccggaccgaagaggactccaagccttccacctcgtcagacgccgaagctggacccagcggatcccagcagctgcaaatcccagcccaaccagcctcaagtttgggagctgatacaatgtctgcgggaggtggcggcccattgggcgacaataaccaaggtgccgatggagtgggcaatgcctcgggagattggcattgcgattccacgtggatgggggacagagtcgtcaccaagtccacccgaacctgggtgctgcccagctacaacaaccaccagtaccgagagatcaaaagcggctccgtcgacggaagcaacgccaacgcctactttggatacagcaccccctgggggtactttgactttaaccgcttccacagccactggagcccccgagactggcaaagactcatcaacaactactggggcttcagaccccggtccctcagagccaaaatcttcaacattcaagtcaaagaggtcacggtgcaggactccaccaccaccatcgccaacaacctcacctccaccgtccaagtgtttacggacgacgactaccagctgccctacgtcgtcggcaacgggaccgagggatgcctgccggccttccctccgcaggtctttacgctgccgcagtacggttacgcgacgctgaaccgcgacaacacagaaaatcccaccgagaggagcagcttcttctgcctagagtactttcccagcaagatgctgagaacgggcaacaaccttgagtttacctacaactttgaggaggtgcccttccactccagcttcgctcccagtcagaacctcttcaagctggccaacccgctggtggaccagtacttgtaccgcttcgtgagcacaaataacactggcggagtccagttcaacaagaacctggccgggagatacgccaacacctacaaaaactggttcccggggcccatgggccgaacccagggctggaacctgggctccggggtcaaccgcgccagtgtcagcgccttcgccacgaccaataggatggagctcgagggcgcgagttaccaggtgcccccgcagccgaacggcatgaccaacaacctccagggcagcaacacctatgccctggagaacactatgatcttcaacagccagccggcgaacccgggcaccaccgccacgtacctcgagggcaacatgctcatcaccagcgagagcgagacgcagccggtgaaccgcgtggtgcacaacgtcggcgggcagatggccaccaacaaccagagctccaccactgcccccgcgaccggcacgtacaacctccaggaaatcgtgcccggcagcgtgtggatggagagggacgtgtacctccaaggacccatctgggccaagatcccagagacgggggcgcactttcacccctctccggccatgggcggattcggactcaaacacccaccgcccatgatgctcatcaagaacacgcctgtgcccggaaatatcaccagcttctcggacgtgcccgtcagcagcttcatcacccagtacagcaccgggcaggtcaccgtggagatggagtgggagctcaagaaggaaaactccaagaggtggaacccggagatccagtacacaaacaactacaacgacccccagtttgtggactttgccccggacagcaccggggaatacagaaccaccagacctatcggaacccgataccttacccgacccctttaa

SEQ ID NO: 839 - protein, 724 aa, Artificial Sequence
  Description of Artificial Sequence: Synthetic polypeptide
MSFVDHPPDWLEEVGEGLREFLGLEAGPPKPKPNQQHQDQARGLVLPGYNYLGPGNGLDRGEPVNRADEVAREHDISYNEQLEAGDNPYLKYNHADAEFQEKLADDTSFGGNLGKAVFQAKKRVLEPFGLAEEGAKTAPTGKRIDDHFPKRKKARTEEDSKPSTSSDAEAGPSGSQQLQIPAQPASSLGADTMSAGGGGPLGDNNQGADGVGNASGDWHCDSTWMGDRVVTKSTRTWVLPSYNNHQYREIKSGSVDGSNANAYFGYSTPWGYFDFNRFHSHWSPRDWQRLINNYWGFRPRSLRAKIFNIQVKEVTVQDSTTTIANNLTSTVQVFTDDDYQLPYVVGNGTEGCLPAFPPQVFTLPQYGYATLNRDNTENPTERSSFFCLEYFPSKMLRTGNNLEFTYNFEEVPFHSSFAPSQNLFKLANPLVDQYLYRFVSTNNTGGVQFNKNLAGRYANTYKNWFPGPMGRTQGWNLGSGVNRASVSAFATTNRMELEGASYQVPPQPNGMTNNLQGSNTYALENTMIFNSQPANPGTTATYLEGNMLITSESETQPVNRVVHNVGGQMATNNQSSTTAPATGTYNLQEIVPGSVWMERDVYLQGPIWAKIPETGAHFHPSPAMGGFGLKHPPPMMLIKNTPVPGNITSFSDVPVSSFITQYSTGQVTVEMEWELKKENSKRWNPEIQYTNNYNDPQFVDFAPDSTGEYRTTRPIGTRYLTRPL

SEQ ID NO: 840 - DNA, 2175 bp, Artificial Sequence
  Description of Artificial Sequence: Synthetic polynucleotide
atgtcttttgttgatcaccctccagattggttggaagaagttggtgaaggtcttcgcgagtttttgggccttgaagcgggcccaccgaaaccaaaacccaatcagcagcatcaagatcaagcccgtggtcttgtgctgcctggttataactatctcggacccggaaacggtctcgatcgaggagagcctgtcaacagggcagacgaggtcgcgcgagagcacgacatctcgtacaacgagcagcttgaggcgggagacaacccctacctcaagtacaaccacgcggacgccgagtttcaggagaagctcgccgacgacacatccttcgggggaaacctcggaaaggcagtctttcaggccaagaaaagggttctcgaaccttttggcctggttgaagagggtgctaagacggcccctaccggaaagcggatagacgaccactttccaaaaagaaagaaggcccggaccgaagaggactccaagccttccacctcgtcagacgccgaagctggacccagcggatcccagcagctgcaaatcccagcccaaccagcctcaagtttgggagctgatacaatgtctgcgggaggtggcggcccattgggcgacaataaccaaggtgccgatggagtgggcaatgcctcgggagattggcattgcgattccacgtggatgggggacagagtcgtcaccaagtccacccgaacctgggtgctgcccagctacaacaaccaccagtaccgagagatcaaaagcggctccgtcgacggaggcaacgccaacgcctactttggatacagcaccccctgggggtactttgactttaaccgcttccacagccactggagcccccgggactggcaaagactcatcaacaactactggggcttcagaccccggtccctcagagtcaaaatcttcaacattcaagtcaaagaggtcacggtgcaggactccaccaccaccatcgccaacaacctcacctccaccgtccaagtgtttacggacgacgactaccagctgccctacgtcgtcggcaacgggaccgagggatgcctgccggccttccctccgcaggtctttacgctgccgcagtacggttacgcgacgctgaaccgcgacaacacagaaaatcccaccgagaggagcagcttcttctgcctagagtactttcccagcaagatgctgagaacgggcaacaactttgagtttacctacaactttgaggaggtgcccttccactccagcttcgctcccagtcagaacctcttcaagctggccaacccgctggtggaccagtacttgtaccgcttcgtgagcacaaataacactggcggagtccagttcaacaagaacctggccgggagatacgccaacacctacaaaaactggttcccggggcccatgggccgaacccagggctggaacctgggctccggggtcaaccgcgccagtgtcagcgccttcgccacgaccaataggatggagctcgagggcgcgagttaccaggtgcccccgcagccgaacggcatgaccaacaacctccagggcagcaacacctatgccctggagaacactatgatcttcaacagccagccggcgaacccgggcaccaccgccacgtacctcgagggcaacatgctcatcaccagcgagagcgagacgcagccggtgaaccgcgtggcgtacaacgtcggcgggcagatggccaccaacaaccagagctccaccactgcccccgcgaccggcacgtacaacctccaggaaatcgtgcccggcagcgtgtggatggagagggacgtgtacctccaaggacccatctgggccaagatcccagagacgggggcgcactttcacccctctccggccatgggcggattcggactcaaacacccaccgcccatgatgctcatcaagaacacgcctgcgcccggaaatatcaccagcttctcggacgtgcccgtcagcagcttcatcacccagtacagcaccgggcaggtcaccgtggagatggagtgggagctcaagaagggaaactccaagaggtggaacccagagatccagtacacaaacaactacaacgacccccagtttgtggactttgccccggacagcaccggggaatacagaaccaccagacctatcggaacccgataccttacccgacccctttaa

SEQ ID NO: 841 - protein, 724 aa, Artificial Sequence
  Description of Artificial Sequence: Synthetic polypeptide
MSFVDHPPDWLEEVGEGLREFLGLEAGPPKPKPNQQHQDQARGLVLPGYNYLGPGNGLDRGEPVNRADEVAREHDISYNEQLEAGDNPYLKYNHADAEFQEKLADDTSFGGNLGKAVFQAKKRVLEPFGLVEEGAKTAPTGKRIDDHFPKRKKARTEEDSKPSTSSDAEAGPSGSQQLQIPAQPASSLGADTMSAGGGGPLGDNNQGADGVGNASGDWHCDSTWMGDRVVTKSTRTWVLPSYNNHQYREIKSGSVDGGNANAYFGYSTPWGYFDFNRFHSHWSPRDWQRLINNYWGFRPRSLRVKIFNIQVKEVTVQDSTTTIANNLTSTVQVFTDDDYQLPYVVGNGTEGCLPAFPPQVFTLPQYGYATLNRDNTENPTERSSFFCLEYFPSKMLRTGNNFEFTYNFEEVPFHSSFAPSQNLFKLANPLVDQYLYRFVSTNNTGGVQFNKNLAGRYANTYKNWFPGPMGRTQGWNLGSGVNRASVSAFATTNRMELEGASYQVPPQPNGMTNNLQGSNTYALENTMIFNSQPANPGTTATYLEGNMLITSESETQPVNRVAYNVGGQMATNNQSSTTAPATGTYNLQEIVPGSVWMERDVYLQGPIWAKIPETGAHFHPSPAMGGFGLKHPPPMMLIKNTPAPGNITSFSDVPVSSFITQYSTGQVTVEMEWELKKGNSKRWNPEIQYTNNYNDPQFVDFAPDSTGEYRTTRPIGTRYLTRPL

SEQ ID NO: 842 - DNA, 2208 bp, Artificial Sequence
  Description of Artificial Sequence: Synthetic polynucleotide
atggctgccgatggttatcttccagattggctcgaggacaaccttagtgaaggaattcgcgagtggtgggctttgaaacctggagcccctcaacccaaggcaaatcaacaacatcaagacaacgctcgaggtcttgtgcttccgggttacaaataccttggacccggcaacggactcgacaagggggagccggtcaacgcagcagacgcggcggccctcgagcacgacaaggcctacgaccagcagctcaaggccggagacaacccgtacctcaagtacaaccacgccgacgccgagttccaggagcggctcaaagaagatacgtcttttgggggcaacctcgggcgagcagtcttccaggccaaaaagaggcttcttgaacctcttggtctggttgaggaagcggctaagacggctcctggaaagaagaggcctgtagagcagtctcctcaggaaccggactcctccgcgggtattggcaaatcgggtgcacagcccgctaaaaagagactcaatttcggtcagactggcgacacagagtcagtcccagaccctcaaccaatcggagaacctcccgcagccccctcaggtgtgggatctcttacaatggcttcaggtggtggcgcaccagtggcagacaataacgaaggtgccgatggagtgggtagttcctcgggaaattggcattgcgattcccaatggctgggggacagagtcatcaccaccagcacccgaacctgggccctgcccacctacaacaatcacctctacaagcaaatctccaacagcacatctggaggatcttcaaatgacaacgcctacttcggctacagcaccccctgggggtattttgacttcaacagattccactgccacttctcaccacgtgactggcagcgactcatcaacaacaactggggattccggcctaagcgactcaacttcaagctcttcaacattcaggtcaaagaggttacggacaacaatggagtcaagaccatcgccaataaccttaccagcacggtccaggtcttcacggactcagactatcagctcccgtacgtgctcgggtcggctcacgagggctgcctcccgccgttcccagcggacgttttcatgattcctcagtacgggtatctgacgcttaatgatggaagccaggccgtgggtcgttcgtccttttactgcctggaatatttcccgtcgcaaatgctaagaacgggtaacaacttccagttcagctacgagtttgagaacgtacctttccatagcagctacgctcacagccagagcctggaccgactaatgaatccactcatcgaccaatacttgtactatctctcaaagactattaacggttctggacagaatcaacaaacgctaaaattcagtgtggccggacccagcaacatggctgtccagggaagaaactacatacctggacccagctaccgacaacaacgtgtctcaaccactgtgactcaaaacaacaacagcgaatttgcttggcctggagcttcttcttgggctctcaatggacgtaatagcttgatgaatcctggacctgctatggccagccacaaagaaggagaggaccgtttctttcctttgtctggatctttaatttttggcaaacaaggaactggaagagacaacgtggatgcggacaaagtcatgataaccaacgaagaagaaattaaaactactaacccggtagcaacggagtcctatggacaagtggccacaaaccaccagagtgcccaagcacaggcgcagaccggctgggttcaaaaccaaggaatacttccgggtatggtttggcaggacagagatgtgtacctgcaaggacccatttgggccaaaattcctcacacggacggcaactttcacccttctccgctgatgggagggtttggaatgaagcacccgcctcctcagatcctcatcaaaaacacacctgtacctgcggatcctccaacggccttcaacaaggacaagctggactctttcatcacccagtattctactggccaagtcagcgtggagatcgagtgggagctgcagaaggaaaacagcaagcgctggaacccggtgatccagtacacttccaactattacaagtctaataatgttgaatttgctgttaatactgaaggtgtatatagtgaaccccgccccattggcaccagatacctgactcgtaatctg

SEQ ID NO: 843 - protein, 736 aa, Artificial Sequence
  Description of Artificial Sequence: Synthetic polypeptide
MAADGYLPDWLEDNLSEGIREWWALKPGAPQPKANQQHQDNARGLVLPGYKYLGPGNGLDKGEPVNAADAAALEHDKAYDQQLKAGDNPYLKYNHADAEFQERLKEDTSFGGNLGRAVFQAKKRLLEPLGLVEEAAKTAPGKKRPVEQSPQEPDSSAGIGKSGAQPAKKRLNFGQTGDTESVPDPQPIGEPPAAPSGVGSLTMASGGGAPVADNNEGADGVGSSSGNWHCDSQWLGDRVITTSTRTWALPTYNNHLYKQISNSTSGGSSNDNAYFGYSTPWGYFDFNRFHCHFSPRDWQRLINNNWGFRPKRLNFKLFNIQVKEVTDNNGVKTIANNLTSTVQVFTDSDYQLPYVLGSAHEGCLPPFPADVFMIPQYGYLTLNDGSQAVGRSSFYCLEYFPSQMLRTGNNFQFSYEFENVPFHSSYAHSQSLDRLMNPLIDQYLYYLSKTINGSGQNQQTLKFSVAGPSNMAVQGRNYIPGPSYRQQRVSTTVTQNNNSEFAWPGASSWALNGRNSLMNPGPAMASHKEGEDRFFPLSGSLIFGKQGTGRDNVDADKVMITNEEEIKTTNPVATESYGQVATNHQSAQAQAQTGWVQNQGILPGMVWQDRDVYLQGPIWAKIPHTDGNFHPSPLMGGFGMKHPPPQILIKNTPVPADPPTAFNKDKLDSFITQYSTGQVSVEIEWELQKENSKRWNPVIQYTSNYYKSNNVEFAVNTEGVYSEPRPIGTRYLTRNL

SEQ ID NO: 844 - protein, 736 aa, Artificial Sequence
  Description of Artificial Sequence: Synthetic polypeptide
MAADGYLPDWLEDNLSEGIREWWDLKPGAPKPKANQQKQDDGRGLVLPGYKYLGPFNGLDKGEPVNAADAAALEHDKAYDQQLKAGDNPYLRYNHADAEFQERLQEDTSFGGNLGRAVFQAKKRVLEPLGLVEEGAKTAPGKKRPVEQSPQEPDSSSGIGKTGQQPAKKRLNFGQTGDSESVPDPQPLGEPPATPAAVGPTTMASGGGAPMADNNEGADGVGNASGNWHCDSTWLGDRVITTSTRTWALPTYNNHLYKQISSTSTGASNDNHYFGYSTPWGYFDFNRFHCHFSPRDWQRLINNNWGFRPKRLNFKLFNIQVKEVTTNDGVTTIANNLTSTVQVFSDSEYQLPYVLGSAHQGCLPPFPADVFMIPQYGYLTLNNGSQAVGRSSFYCLEYFPSQMLRTGNNFTFSYTFEEVPFHSSYAHSQSLDRLMNPLIDQYLYYLNRTQNQSGSAQNKDLLFSRGSPAGMSVQPKNWLPGPCYRQQRVSKTKTDNNNSNFTWTGASKYNLNGRESIINPGTAVASHKDDEDKFFPMSGVMIFGKESAGASNTALDNVMITDEEEIKATNPVATERFGTVAVNFQSSSTDPATGDVHAMGALPGMVWQDRDVYLQGPIWAKIPHTDGHFHPSPLMGGFGLKNPPPQILIKNTPVPANPPAEFSATKFASFITQYSTGQVSVEIEWELQKENSKRWNPEVQYTSNYAKSANVDFTVDNNGLYTEPRPIGTRYLTRPL

SEQ ID NO: 845 - protein, 736 aa, Artificial Sequence
  Description of Artificial Sequence: Synthetic polypeptide
MAADGYLPDWLEDNLSEGIREWWDLKPGAPKPKANQQKQDDGRGLVLPGYKYLGPFNGLDKGEPVNAADAAALEHDKAYDQQLKAGDNPYLRYNHADAEFQERLQEDTSFGGNLGRAVFQAKKRVLEPFGLVEEGAKTAPGKKRPVEQSPQEPDSSSGIGKSGQQPAKKRLNFGQTGDSESVPDPQPLGEPPATPAALGPTTMASGGGAPMADNNEGADGVGNASGNWHCDSTWLGDRVITTSTRTWALPTYNNHLYKQISSASTGASNDNHYFGYSTPWGYFDFNRFHCHFSPRDWQRLINNNWGFRPKRLNFKLFNIQVKEVTTNDGVTTIANNLTSTVQVFSDSEYQLPYVLGSAHQGCLPPFPADVFMIPQYGYLTLNNGSKAVGRSSFYCLEYFPSQMLRTGNNFTFSYTFEEVPFHSSYAHSQSLDRLMNPLIDQYLYYLNRTQNQSGSAQNKDLLFSRGSPAGMSVQPKNWLPGPCYRQQRVSKTKTDNNNSNFTWTGASKYNLNGRESIINPGTAMASHKDDEDKFFPMSGVMIFGKESAGASNTALDNVMITDEEEIKATNPVATERFGTVAVNFQSSSTDPATGDVHVMGALPGMVWQDRDVYLQGPIWAKIPHTDGHFHPSPLMGGFGLKHPPPQILIKNTPVPANPPAEFSATKFASFITQYSTGQVSVEIEWELQKENSKRWNPEVQYTSNYAKSANVDFTVDNNGLYTEPRPIGTRYLTRPL

SEQ ID NO: 846 - DNA, 2211 bp, Artificial Sequence
  Description of Artificial Sequence: Synthetic polynucleotide
atggctgctgacggttatcttccagattggctcgaggacaacctttctgaaggcattcgtgagtggtgggctctgaaacctggagtccctcaacccaaagcgaaccaacaacaccaggacaaccgtcggggtcttgtgcttccgggttacaaatacctcggacccggtaacggactcgacaaaggagagccggtcaacgaggcggacgcggcagccctcgaacacgacaaagcttacgaccagcagctcaaggccggtgacaacccgtacctcaagtacaaccacgccgacgccgagtttcaggagcgtcttcaagaagatacgtcttttgggggcaaccttggcagagcagtcttccaggccaaaaagaggatccttgagcctcttggtctggttgaggaagcagctaaaacggctcctggaaagaagaggcctgtagatcagtctcctcaggaaccggactcatcatctggtgttggcaaatcgggcaaacagcctgccagaaaaagactaaatttcggtcagactggcgactcagagtcagtcccagaccctcaacctctcggagaaccaccagcagcccccacaagtttgggatctaatacaatggcttcaggcggtggcgcaccaatggcagacaataacgagggtgccgatggagtgggtaattcctcaggaaattggcattgcgattcccaatggctgggcgacagagtcatcaccaccagcaccagaacctgggccctgcccacttacaacaaccatctctacaagcaaatctccagccaatcaggagcttcaaacgacaaccactactttggctacagcaccccttgggggtattttgactttaacagattccactgccacttctcaccacgtgactggcagcgactcattaacaacaactggggattccggcccaagaaactcagcttcaagctcttcaacatccaagttaaagaggtcacgcagaacgatggcacgacgactattgccaataaccttaccagcacggttcaagtgtttacggactcggagtatcagctcccgtacgtgctcgggtcggcgcaccaaggctgtctcccgccgtttccagcggacgtcttcatggtccctcagtatggatacctcaccctgaacaacggaagtcaagcggtgggacgctcatccttttactgcctggagtacttcccttcgcagatgctaaggactggaaataacttccaattcagctataccttcgaggatgtaccttttcacagcagctacgctcacagccagagtttggatcgcttgatgaatcctcttattgatcagtatctgtactacctgaacagaacgcaaggaacaacctctggaacaaccaaccaatcacggctgctttttagccaggctgggcctcagtctatgtctttgcaggccagaaattggctacctgggccctgctaccggcaacagagactttcaaagactgctaacgacaacaacaacagtaactttccttggacagcggccagcaaatatcatctcaatggccgcgactcgctggtgaatccaggaccagctatggccagtcacaaggacgatgaagaaaaatttttccctatgcacggcaatctaatatttggcaaagaagggacaacggcaagtaacgcagaattagataatgtaatgattacggatgaagaagagattcgtaccaccaatcctgtggcaacagagcagtatggaactgtggcaaataacttgcagagctcaaatacagctcccacgactagaactgtcaatgatcagggggccttacctggcatggtgtggcaagatcgtgacgtgtaccttcaaggacctatctgggcaaagattcctcacacggatggacactttcatccttctcctctgatgggaggctttggactgaaacatccgcctcctcaaatcatgatcaaaaatactccggtaccggcaaatcctccgacgactttcagcccggccaagtttgcttcatttatcactcagtactccactggacaggtcagcgtggaaattgagtgggagctacagaaagaaaacagcaaacgttggaatccagagattcagtacacttccaactacaacaagtctgttaatgtggactttactgtagacactaatggtgtttatagtgaacctcgccctattggaacccggtatctcacacgaaacttgtaa

SEQ ID NO: 847 - protein, 736 aa, Artificial Sequence; identical to SEQ ID NO: 63
  Description of Artificial Sequence: Synthetic polypeptide

SEQ ID NO: 848 - DNA, 2205 bp, Artificial Sequence; identical to SEQ ID NO: 108
  Description of Artificial Sequence: Synthetic polynucleotide

SEQ ID NO: 849 - protein, 734 aa, Artificial Sequence; identical to SEQ ID NO: 81
  Description of Artificial Sequence: Synthetic polypeptide

SEQ ID NO: 850 - DNA, 2234 bp, Artificial Sequence
  Description of Artificial Sequence: Synthetic polynucleotide
atgtcttttgttgatcaccctccagattggttggaagaagttggtgaaggtcttcgcgagtttttgggccttgaagcgggcccaccgaaaccaaaacccaatcagcagcatcaagatcaagcccgtggtcttgtgctgcctggttataactatctcggacccggaaacggtctcgatcgaggagagcctgtcaacagggcagacgaggtcgcgcgagagcacgacatctcgtacaacgagcagcttgaggcgggagacaacccctacctcaagtacaaccacgcggacgccgagtttcaggagaagctcgccgacgacacatccttcgggggaaacctcggaaaggcagtctttcaggccaagaaaagggttctcgaaccttttggcctggttgaagagggtgctaagacggcccctaccggaaagcggatagacgaccactttccaaaaagaaagaaggctcggaccgaagaggactccaagccttccacctcgtcagacgccgaagctggacccagcggatcccagcagctgcaaatcccagcccaaccagcctcaagtttgggagctgatacaatgtctgcgggaggtggcggcccattgggcgacaataaccaaggtgccgatggagtgggcaatgcctcgggagattggcattgcgattccacgtggatgggggacagagtcgtcaccaagtccacccgaacctgggtgctgcccagctacaacaaccaccagtaccgagagatcaaaagcggctccgtcgacggaagcaacgccaacgcctactttggatacagcaccccctgggggtactttgactttaaccgcttccacagccactggagcccccgagactggcaaagactcatcaacaactactggggcttcagaccccggtccctcagagtcaaaatcttcaacattcaagtcaaagaggtcacggtgcaggactccaccaccaccatcgccaacaacctcacctccaccgtccaagtgtttacggacgacgactaccagctgccctacgtcgtcggcaacgggaccgagggatgcctgccggccttccctccgcaggtctttacgctgccgcagtacggttacgcgacgctgaaccgcgacaacacagaaaatcccaccgagaggagcagcttcttctgcctagagtactttcccagcaagatgctgagaacgggcaacaactttgagtttacctacaactttgaggaggtgcccttccactccagcttcgctcccagtcagaacctgttcaagctggccaacccgctggtggaccagtacttgtaccgcttcgtgagcacaaataacactggcggagtccagttcaacaagaacctggccgggagatacgccaacacctacaaaaactggttcccggggcccatgggccgaacccagggctggaacctgggctccggggtcaaccgcgccagtgtcagcgccttcgccacgaccaataggatggagctcgagggcgcgagttaccaggtgcccccgcagccgaacggcatgaccaacaacctccagggcagcaacacctatgccctggagaacactatgatcttcaacagccagccggcgaacccgggcaccaccgccacgtacctcgagggcaacatgctcatcaccagcgagagcgagacgcagccggtgaaccgcgtggcgtacaacgtcggcgggcagatggccaccaacaaccagagctccaccactgcccccgcgaccggcacgtacaacctccaggaaatcgtgcccggcagcgtgtggatggagagggacgtgtacctccaaggacccatctgggccaagatcccagagacgggggcgcactttcacccctctccggccatgggcggattcggactcaaacacccaccgcccatgatgctcatcaagaacacgcctgtgcccggaaatatcaccagcttctcggacgtgcccgtcagcagcttcatcacccagtacagcaccgggcaggtcaccgtggagatggagtgggagctcaagaaggaaaactccaagaggtggaacccagagatccagtacacaaacaactacaacgacccccagtttgtggactttgccccggacagcaccggggaatacagaaccaccagacctatcggaacccgataccttacccgacccctttaacccattcatgtcgcataccctcaataaaccgtgtattcgtgtcagtaaaatactgcctc

SEQ ID NO: 851 - protein, 723 aa, Artificial Sequence
  Description of Artificial Sequence: Synthetic polypeptide
MSFVDHPPDWLEEVGEGLREFLGLEAGPPKPKPNQQHQDQARGLVLPGYNYLGPGNGLDRGEPVNRADEVAREHDISYNEQLEAGDNPYLKYNHADAEFQEKLADDTSFGGNLGKAVFQAKKRVLEPFGLVEEGAKTAPTGKRIDDHFPKRKKARTEEDSKPSTSSDAEAGPSGSQQLQIPAQPASSLGADTMSAGGGPLGDNNQGADGVGNASGDWHCDSTWMGDRVVTKSTRTWVLPSYNNHQYREIKSGSVDGSNANAYFGYSTPWGYFDFNRFHSHWSPRDWQRLINNYWGFRPRSLRVKIFNIQVKEVTVQDSTTTIANNLTSTVQVFTDDDYQLPYVVGNGTEGCLPAFPPQVFTLPQYGYATLNRDNTENPTERSSFFCLEYFPSKMLRTGNNFEFTYNFEEVPFHSSFAPSQNLFKLANPLVDQYLYRFVSTNNTGGVQFNKNLAGRYANTYKNWFPGPMGRTQGWNLGSGVNRASVSAFATTNRMELEGASYQVPPQPNGMTNNLQGSNTYALENTMIFNSQPANPGTTATYLEGNMLITSESETQPVNRVAYNVGGQMATNNQSSTTAPATGTYNLQEIVPGSVWMERDVYLQGPIWAKIPETGAHFHPSPAMGGFGLKHPPPMMLIKNTPVPGNITSFSDVPVSSFITQYSTGQVTVEMEWELKKENSKRWNPEIQYTNNYNDPQFVDFAPDSTGEYRTTRPIGTRYLTRPL

SEQ ID NO: 852 - DNA, 2601 bp, Artificial Sequence
  Description of Artificial Sequence: Synthetic polynucleotide
ccatcgacgtcagacgcggaagcttcgatcaactacgcggacaggtaccaaaacaaatgttctcgtcacgtgggcatgaatctgatgctgtttccctgcagacaatgcgagagactgaatcagaattcaaatatctgcttcactcacggtgtcaaagactgtttagagtgctttcccgtgtcagaatctcaacccgtttctgtcgtcaaaaaggcgtatcagaaactgtgctacattcatcacatcatgggaaaggtgccagacgcttgcactgcttgcgacctggtcaatgtggacttggatgactgtgtttctgaacaataaatgacttaaaccaggtatgactgccgatggttatcttccagattggctcgaggacaaccttagtgaaggaattcgcgagtggtgggctttgaaacctggagcccctcaacccaaggcaaatcaacaacatcaagacaacgctcgaggtcttgtgcttccgggttacaaataccttggacccggcaacggactcgacaagggggagccggtcaacgcagcagacgcggcggccctcgagcacgacaaggcctacgaccagcagctcaaggccggagacaacccgtacctcaagtacaaccacgccgacgccgagttccaggagcggctcaaagaagatacgtcttttgggggcaacctcgggcgagcagtcttccaggccaaaaagaggcttcttgaacctcttggtctggttgaggaagcggctaagacggctcctggaaagaagaggcctgtagagcagtctcctcaggaaccggactcctccgcgggtattggcaaatcgggtgcacagcccgctaaaaagagactcaatttcggtcagactggcgacacagagtcagtcccagaccctcaaccaatcggagaacctcccgcagccccctcaggtgtgggatctcttacaatggcttcaggtggtggcgcaccagtggcagacaataacgaaggtgccgatggagtgggtagttcctcgggaaattggcattgcgattcccaatggctgggggacagagtcatcaccaccagcacccgaacctgggccctgcccacctacaacaatcacctctacaagcaaatctccaacagcacatctggaggatcttcaaatgacaacgcctacttcggctacagcaccccctgggggtattttgacttcaacagattccactgccacttctcaccacgtgactggcagcgactcatcaacaacaactggggattccggcctaagcaactcaacttcaagctcttcaacattcaggtcaaagaggttacggacaacaatggagtcaagaccatcgccaataaccttaccagcacggtccaggtcttcacggactcagactatcagctcccgtacgtgctcgggtcggctcacgagggctgcctcccgccgttcccagcggacgttttcatgattcctcagtacgggtatctgacgcttaatgatggaagccaggccgtgggtcgttcgtccttttactgcctggaatatttcccgtcgcaaatgctaagaacgggtaacaacttccagttcagctacgagtttgagaacgtacctttccatagcagctacgctcacagccaaagcctggaccgactaatgaatccactcatcgaccaatacttgtactatctctcaaagactattaacggttctggacagaatcaacaaacgctaaaattcagtgtggccggacccagcaacatggctgtccagggaagaaactacatacctggacccagctaccgacaacaacgtgtctcaaccactgtgactcaaaacaacaacagcgaatttgcttggcctggagcttcttcttgggctctcaatggacgtaatagcttgatgaatcctggacctgctatggccagccacaaagaaggagaggaccgtttctttcctttgtctggatctttaatttttggcaaacaaggaactggaagagacaacgtggatgcggacaaagtcatgataaccaacgaagaagaaattaaaactactaacccggtagcaacggagtcctatggacaagtggccacaaaccaccagagtgcccaagcacaggcgcagaccggctgggttcaaaaccaaggaatacttccgggtatggtttggcaggacagagatgtgtacctgcaaggacccatttgggccaaaattcctcacacggacggcaactttcacccttctccgctgatgggagggtttggaatgaagcacccgcctcctcagatcctcatcaaaaacacacctgtacctgcggatcctccaacggccttcaacaaggacaagctgaactctttcatcacccagtattctactggccaagtcagcgtggagatcgagtgggagctgcagaaggaaaacagcaagcgctggaacccggagatccagtacacttccaactattacaagtctaataatgttgaatttgctgttaatactgaaggtgtatatagtgaaccccgccccattggcaccagatacctgactcgtaatctgtaattgcttgttaatcaataaaccgtttaattcgtttcagttgaactgcggcc

SEQ ID NO: 853 - protein, 736 aa, Artificial Sequence
  Description of Artificial Sequence: Synthetic polypeptide
MTADGYLPDWLEDNLSEGIREWWALKPGAPQPKANQQHQDNARGLVLPGYKYLGPGNGLDKGEPVNAADAAALEHDKAYDQQLKAGDNPYLKYNHADAEFQERLKEDTSFGGNLGRAVFQAKKRLLEPLGLVEEAAKTAPGKKRPVEQSPQEPDSSAGIGKSGAQPAKKRLNFGQTGDTESVPDPQPIGEPPAAPSGVGSLTMASGGGAPVADNNEGADGVGSSSGNWHCDSQWLGDRVITTSTRTWALPTYNNHLYKQISNSTSGGSSNDNAYFGYSTPWGYFDFNRFHCHFSPRDWQRLINNNWGFRPKQLNFKLFNIQVKEVTDNNGVKTIANNLTSTVQVFTDSDYQLPYVLGSAHEGCLPPFPADVFMIPQYGYLTLNDGSQAVGRSSFYCLEYFPSQMLRTGNNFQFSYEFENVPFHSSYAHSQSLDRLMNPLIDQYLYYLSKTINGSGQNQQTLKFSVAGPSNMAVQGRNYIPGPSYRQQRVSTTVTQNNNSEFAWPGASSWALNGRNSLMNPGPAMASHKEGEDRFFPLSGSLIFGKQGTGRDNVDADKVMITNEEEIKTTNPVATESYGQVATNHQSAQAQAQTGWVQNQGILPGMVWQDRDVYLQGPIWAKIPHTDGNFHPSPLMGGFGMKHPPPQILIKNTPVPADPPTAFNKDKLNSFITQYSTGQVSVEIEWELQKENSKRWNPEIQYTSNYYKSNNVEFAVNTEGVYSEPRPIGTRYLTRNL

SEQ ID NO: 854 - DNA, 2601 bp, Artificial Sequence
  Description of Artificial Sequence: Synthetic polynucleotide
ccatcgacgtcagacgcggaagcttcgatcaactacgcggacaggtaccaaaacaaatgttctcgtcacgtgggcatgaatctgatgctgtttccctgcagacaatgcgagagactgaatcagaattcaaatatctgcttcactcacggtgtcaaagactgtttagagtgctttcccgtgtcagaatctcaacccgtttctgtcgtcaaaaaggcgtatcagaaactgtgctacattcatcacatcatgggaaaggtgccagacgcttgcactgcttgcgacctggtcaatgtggacttggatgactgtgtttctgaacaataaatgacttaaaccaggtatggctgccgatggttatcttccagattggctcgaggacaaccttagtgaaggaattcgcgagtggtgggctttgaaacctggagcccctcaacccaaggcaaatcaacaacatcaagacaacgctcgaggtcttgtgcttccgggttacaaataccttggacccggcaacggactcgacaagggggagccgatcaacgcagcagacgcggcggccctcgagcacgacaaggcctacgaccagcagctcaaggccggagacaacccgtacctcaagtacaaccacgccgacgccgagttccaggagcggctcaaagaagatacgtcttttgggggcaacctcgggcgagcagtcttccaggccaaaaagaggcttcttgaacctcttggtctggttgaggaagcggctaagacggctcctggaaagaagaggcctgtagagcagtctcctcaggaaccggactcctccgcgggtattggcaaatcgggtgcacagcccgctaaaaagagactcaatttcggtcagactggcgacacagagtcagtcccagaccctcaaccaatcggagaacctcccgcagccccctcaggtgtgggatctcttacaatggcttcaggtggtggcgcaccagtggcagacaataacgaaggtgccgatggagtgggtagttcctcgggaaattggcattgcgattcccaatggctgggggacagagtcatcaccaccagcacccgaacctgggccctgcccacctacaacaatcacctctacaagcaaatctccaacagcacatctggaggatcttcaaatgacaacgcctacttcggctacagcaccccctgggggtattttgacttcaacagattccactgccacttctcaccacgtgactggcagcgactcatcaacaacaactggggattccggcctaagcgactcaacttcaagctcttcaacattcaggtcaaagaggttacggacaacaatggagtcaagaccatcgccaataaccttaccagcacggtccaggtcttcacggactcagactatcagctcccgtacgtgctcgggtcggctcacgagggctgcctcccgccgttcccagcggacgttttcatgattcctcagtacgggtatctgacgcttaatgatggaagccaggccgtgggtcgttcgtccttttactgcctggaatatttcccgtcgcaaatgctaagaacgggtaacaacttccagttcagctacgagtttgagaacgtacctttccatagcagctacgctcacagccaaagcctggaccgactaatgaatccactcatcgaccaatacttgtactatctctcaaagactattaacggttctggacagaatcaacaaacgctaaaattcagtgtggccggacccagcaacatggctgtccagggaagaaactacatacctggacccagctaccgacaacaacgtgtctcaaccactgtgactcaaaacaacaacagcgaatttgcttggcctggagcttcttcttgggctctcaatggacgtaatagcttgatgaatcctggacctgctatggccagccacaaagaaggagaggaccgtttctttcctttgtctggatctttaatttttggcaaacaaggaactggaagagacaacgtggatgcggacaaagtcatgataaccaacgaagaagaaattaaaactactaacccggtagcaacggagtcctatggacaagtggccacaaaccaccagagtgcccaagcacaggcgcagaccggctgggttcaaaaccaaggaatacttccgggtatggtttggcaggacagagatgtgtacctgcaaggacccatttgggccaaaattcctcacacgtacggcaactttcacccttctccgctgatgggagggtttggaatgaagcacccgcctcctcagatcctcatcaaaaacacacctgtacctgcggatcctccaacggccttcaacaaggacaagctgaactctttcatcacccagtattctactggccaagtcagcgtggagatcgagtgggagctgcagaaggaaaacagcaagcgctggaacccggagatccagtacacttccaactattacaagtctaataatgttgaatttgctgttaatactgaaggtgtatatagtgaaccccgccccattggcaccagatacctgactcgtaatctgtaattgcttgttaatcaataaaccgtttaattcgtttcagttgaactgcggcc

SEQ ID NO: 855 - protein, 736 aa, Artificial Sequence
  Description of Artificial Sequence: Synthetic polypeptide
MAADGYLPDWLEDNLSEGIREWWALKPGAPQPKANQQHQDNARGLVLPGYKYLGPGNGLDKGEPINAADAAALEHDKAYDQQLKAGDNPYLKYNHADAEFQERLKEDTSFGGNLGRAVFQAKKRLLEPLGLVEEAAKTAPGKKRPVEQSPQEPDSSAGIGKSGAQPAKKRLNFGQTGDTESVPDPQPIGEPPAAPSGVGSLTMASGGGAPVADNNEGADGVGSSSGNWHCDSQWLGDRVITTSTRTWALPTYNNHLYKQISNSTSGGSSNDNAYFGYSTPWGYFDFNRFHCHFSPRDWQRLINNNWGFRPKRLNFKLFNIQVKEVTDNNGVKTIANNLTSTVQVFTDSDYQLPYVLGSAHEGCLPPFPADVFMIPQYGYLTLNDGSQAVGRSSFYCLEYFPSQMLRTGNNFQFSYEFENVPFHSSYAHSQSLDRLMNPLIDQYLYYLSKTINGSGQNQQTLKFSVAGPSNMAVQGRNYIPGPSYRQQRVSTTVTQNNNSEFAWPGASSWALNGRNSLMNPGPAMASHKEGEDRFFPLSGSLIFGKQGTGRDNVDADKVMITNEEEIKTTNPVATESYGQVATNHQSAQAQAQTGWVQNQGILPGMVWQDRDVYLQGPIWAKIPHTYGNFHPSPLMGGFGMKHPPPQILIKNTPVPADPPTAFNKDKLNSFITQYSTGQVSVEIEWELQKENSKRWNPEIQYTSNYYKSNNVEFAVNTEGVYSEPRPIGTRYLTRNL

SEQ ID NO: 856 - DNA, 2601 bp, Artificial Sequence
  Description of Artificial Sequence: Synthetic polynucleotide
ccatcgacgtcagacgcggaagcttcgatcaactacgcggacaggtaccaaaacaaatgttctcgccacgtgggcatgaatctgatgctgtttccctgcagacaatgcgagagactgaatcagaattcaaatatctgcttcactcacggtgtcaaagactgtttagagtgctttcccgtgtcagaatctcaacccgtttctgtcgtcaaaaaggcgtatcagaaactgtgctacattcatcacatcatgggaaaggtgccagacgcttgcactgcttgcgacctggtcaatgtggacttggatgactgtgtttctgaacaataaatgacttaaaccaggtatggctgccgatggttatcttccagattggctcgaggacaaccttagtgaaggaattcgcgagtggtgggctttgaaacctggagcccctcaacccaaggcaaatcaacaacatcaagacaacgctcgaggtcttgtgcttccgggttacaaataccttggacccggcaacggactcgacaagggggagccggtcaacgcagcagacgcggcggccctcgagcacgacaaggcctacgaccagcagctcaaggccggagacaacccgtacctcaagtacaaccacgccgacgccgagttccaggagcggctcaaagaagatacgtcttttgggggcaacctcgggcgagcagtcttccaggccaaaaagaggcttcttgaacctcttggtctggttgaggaagcggctaagacggctcctggaaagaagaggcctgtagagcagtctcctcaggaaccggactcctccgcgggtattggcaaatcgggtgcacagcccgctaaaaagagactcaatttcggtcagactggcgacacagagtcagtcccagaccctcaaccaatcggagaacctcccgctgccccctcaggtgtgggatctcttacaatggcttcaggtggtggcgcaccagtggcagacaataacgaaggtgccgatggagtgggtagttcctcgggaaattggcattgcgattcccaatggctgggggacagagtcatcaccaccagcacccgaacctgggccctgcccacctacaacaatcacctctacaagcaaatctccaacagcacatctggaggatcttcaaatgacaacgcctacttcggctacagcaccccctgggggtattttgacttcaacagattccactgccacttctcaccacatgactggcagcgactcatcaacaacaactggggattccggcctaagcgactcaacttcaagctcttcaacattcaggtcaaagaggttacggacaacaatggagtcaagaccatcgccaataaccttaccagcacggtccaggtcttcacggactcagactatcagctcccgtacgtgctcgggtcggctcacgagggctgcctcccgccgttcccagcggacgttttcatgattcctcagtacgggtatctgacgcttaatgatggaagccaggccgtgggtcgttcgtccttttactgcctggaatatttcccgtcgcaaatgctaagaacgggtaacaacttccagttcagctacgagtttgagaacgtacctttccatagcagctacgctcacagccaaagcctggaccgactaatgaatccactcatcgaccaatacttgtactatctctcaaagactattaacggttctggacagaatcaacaaacgctaaaattcaatgtggccggacccagcaacatggctgtccagggaagaaactacatacctggacccagctaccgacaacaacgtgtctcaaccactgtgactcaaaacaacaacagcgaatttgcctggcctagagcttcttcttgggctctcaatggacgtaatagcttgatgaatcctggacctgctatggccagccacaaagaaggagaggaccgtttctttcctttgtctggatctttaatttttggcaaacaaggaactggaagagacaacgtggatgcggacaaagtcatgataaccaacgaagaagaaattaaaactactaacccggtagcaacggagtcctatggacaagtggccacaaaccaccagagtgcccaagcacaggcgcagaccggctgggttcaaaaccaaggaatacttccgggtatggtttggcaggacagagatgtgtacctgcaaggacccatttgggccaaaattcctcacacggacggcaactttcacccttctccgctgatgggagggtttggaatgaagcacccgcctcctcagatcctcatcaaaaacacacctgtacctgcggatcctccaacggccttcaacaaggacaagctgaactctttcatcacccagtattctactggccaagtcagcatggagatcgagtgggagctgcagaaggaaaacagcaagcgctggaacccggagatccagtacacttccaactattacaagtctaataatgttgaatttgctgttaatactgaaggtgtatatagtgaaccccgccccattggcaccagatacctgactcgtaatctgtaattgcttgttaatcaataaaccgtttaattcgtttcagttgaactgcggcc

SEQ ID NO: 857 - protein, 736 aa, Artificial Sequence
  Description of Artificial Sequence: Synthetic polypeptide
MAADGYLPDWLEDNLSEGIREWWALKPGAPQPKANQQHQDNARGLVLPGYKYLGPGNGLDKGEPVNAADAAALEHDKAYDQQLKAGDNPYLKYNHADAEFQERLKEDTSFGGNLGRAVFQAKKRLLEPLGLVEEAAKTAPGKKRPVEQSPQEPDSSAGIGKSGAQPAKKRLNFGQTGDTESVPDPQPIGEPPAAPSGVGSLTMASGGGAPVADNNEGADGVGSSSGNWHCDSQWLGDRVITTSTRTWALPTYNNHLYKQISNSTSGGSSNDNAYFGYSTPWGYFDFNRFHCHFSPHDWQRLINNNWGFRPKRLNFKLFNIQVKEVTDNNGVKTIANNLTSTVQVFTDSDYQLPYVLGSAHEGCLPPFPADVFMIPQYGYLTLNDGSQAVGRSSFYCLEYFPSQMLRTGNNFQFSYEFENVPFHSSYAHSQSLDRLMNPLIDQYLYYLSKTINGSGQNQQTLKFNVAGPSNMAVQGRNYIPGPSYRQQRVSTTVTQNNNSEFAWPRASSWALNGRNSLMNPGPAMASHKEGEDRFFPLSGSLIFGKQGTGRDNVDADKVMITNEEEIKTTNPVATESYGQVATNHQSAQAQAQTGWVQNQGILPGMVWQDRDVYLQGPIWAKIPHTDGNFHPSPLMGGFGMKHPPPQILIKNTPVPADPPTAFNKDKLNSFITQYSTGQVSMEIEWELQKENSKRWNPEIQYTSNYYKSNNVEFAVNTEGVYSEPRPIGTRYLTRNL

SEQ ID NO: 858 - DNA, 2601 bp, Artificial Sequence
  Description of Artificial Sequence: Synthetic polynucleotide
ccatcgacgtcagacgcggaagcttcgatcaactacgcggacaggtaccaaaacaaatgttctcgtcacgtgggcatgaatctgatgctgtttccctgcagacaatgcgagagactgaatcagaattcaaatatctgcttcactcacggtgtcaaagactgtttagagtgctttcccgtgtcagaatctcaacccgtttctgtcgtcaaaaaggcgtatcagaaactgtgctacattcatcacatcatgggaaaggtgccagacgcttgcactgcttgcgacctggtcaatgtggacttggatgactgtgtttctgaacaataaatgacttaaaccaggtatggctgccgatggttatcttccagattggctcgaggacaaccttagtgaaggaattcgcgagtggtgggctttgaaacctggagcccctcaacccaaggcaaatcaacaacatcaagacaacgctcgaggtcttgtgcttccgggttacaaataccttggacccggcaacggactcgacaagggggagccggtcaacgcagcagacgcggcggccctcgagcacgacaaggcctacgaccagcagctcaaggccggagacaacccgtacctcaagtacaaccacgccgacgccgagttccaggagcggctcaaagaagatacgtcttttgggggcaacctcgggcgagcagtcttccaggccaaaaagaggcttcttgaacctcttggtctggttgaggaagcggctaagacggctcctggaaagaagaggcctgtagagcagtctcctcaggaaccggactcctccgcgggtattggcaaatcgggtgcacagcccgctaaaaagagactcaatttcggtcagactggcgacacagagtcagtcccagaccctcaaccaatcggagaacctcccgcagccccctcaggtgtgggatctcttacaatggcttcaggtggtggcgcaccagtggcagacaataacgaaggtgccgatggagtgggtagttcctcgggaaattggcattgcgattcccaatggctgggggacagagtcatcaccaccagcacccgaacctgggccctgcccacctacaacaatcacctctacaagcaaatctccaacagcacatctggaggatcttcaaatgacaacgcctacttcggctacagcaccccctgggggtattttgacttcaacagattccactgccacttctcaccacgtgactggcagcgactcatcaacaacaactggggattccggcctaagcgactcaacttcaagctcttcaacattcaggtcaaagaggttacggacaacaatggagtcaagaccatcgccaataaccttaccagcacggtccaggtcttcacggactcagactatcagctcccgtacgtgctcgggtcggctcacgagggctgcctcccgccgttcccagcggacgttttcatgattcctcagtacgggtatctgacgcttaatgatggaagccaggccgtgggtcgttcgtccttttactgcctggaatatttcccgtcgcaaatgctaagaacgggtaacaacttccagttcagctacgagtttgagaacgtacctttccatagcagctacgctcacagccaaagcctggaccgactaatgaatccactcatcgaccaatacttgtactatctctcaaagactattaacggttctggacagaatcaacaaacgctaaaattcagtgtggccggacccagcaacatggctgtccagggaagaaactacatacctggacccagctaccgacaacaacgtgtctcaaccactgtgactcaaaacaacaacagcgaatttgcttggcctagagcttcttcttgggctctcaatggacgtaatagcttgatgaatcctggacctgctatggccagccacaaagaaggagaggaccgtttctttcctttgtctggatctttaatttttggcaaacaaggaactggaagagacaacgtggatgcggacaaagtcatgataaccaacgaagaagaaattaaaactactaacccggtagcaacggagtcctatggacaagtggccacaaaccaccagagtgcccaagcacaggcgcagaccggctgggttcaaaaccaaggaatacttccgggtatggtttggcaggacagagatgtgtacctgcaaggacccatttgggccaaaattcctcacacggacggcaactttcacccttctccgctgatgggagggtttggaatgaagcacccgcctcctcagatcctcatcaaaaacacacctgtacctgcggatcctccaacggccttcaacaaggacaagctgaactctttcatcacccagtattctactggccaagtcagcgtggagatcgagtgggagctgcagaaggaaaacagcaagcgctggaacccggagatccagtacacttccaactattacaagtctaataatgttgaatttgctgttaatactgaaggtgtatatagtgaaccccgccccattggcaccagatacctgactcgtaatctgtaattgcttgttaatcaataaaccgtttaattcgtttcagttgaactgcggcc

SEQ ID NO: 859 - protein, 736 aa, Artificial Sequence
  Description of Artificial Sequence: Synthetic polypeptide
MAADGYLPDWLEDNLSEGIREWWALKPGAPQPKANQQHQDNARGLVLPGYKYLGPGNGLDKGEPVNAADAAALEHDKAYDQQLKAGDNPYLKYNHADAEFQERLKEDTSFGGNLGRAVFQAKKRLLEPLGLVEEAAKTAPGKKRPVEQSPQEPDSSAGIGKSGAQPAKKRLNFGQTGDTESVPDPQPIGEPPAAPSGVGSLTMASGGGAPVADNNEGADGVGSSSGNWHCDSQWLGDRVITTSTRTWALPTYNNHLYKQISNSTSGGSSNDNAYFGYSTPWGYFDFNRFHCHFSPRDWQRLINNNWGFRPKRLNFKLFNIQVKEVTDNNGVKTIANNLTSTVQVFTDSDYQLPYVLGSAHEGCLPPFPADVFMIPQYGYLTLNDGSQAVGRSSFYCLEYFPSQMLRTGNNFQFSYEFENVPFHSSYAHSQSLDRLMNPLIDQYLYYLSKTINGSGQNQQTLKFSVAGPSNMAVQGRNYIPGPSYRQQRVSTTVTQNNNSEFAWPRASSWALNGRNSLMNPGPAMASHKEGEDRFFPLSGSLIFGKQGTGRDNVDADKVMITNEEEIKTTNPVATESYGQVATNHQSAQAQAQTGWVQNQGILPGMVWQDRDVYLQGPIWAKIPHTDGNFHPSPLMGGFGMKHPPPQILIKNTPVPADPPTAFNKDKLNSFITQYSTGQVSVEIEWELQKENSKRWNPEIQYTSNYYKSNNVEFAVNTEGVYSEPRPIGTRYLTRNL

SEQ ID NO: 860 - DNA, 2601 bp, Artificial Sequence
  Description of Artificial Sequence: Synthetic polynucleotide
ccatcgacgtcagacgcggaagcttcgatcaactacgcggacaggtaccaaaacaaatgttctcgtcacgtgggcatgaatctgatgctgtttccctgcagacaatgcgagagactgaatcagaattcaaatatctgcttcactcacggtgtcaaagactgtttagagtgctttcccgtgtcagaatctcaacccgtttctgtcgtcaaaaaggcgtatcagaaactgtgctacattcatcacatcatgggaaaggtgccagacgcttgcactgcttgcgacctggtcaatgtggacttggatgactgtgtttctgaacaataaatgacttaaaccaggtatggctgccgatggttatcttccagattggctcgaggacaaccttagtgaaggaattcgcgagtggtgggctttgaaacctggagcccctcaacccaaggcaaatcaacaacatcaagacaacgctcgaggtcttgtgcttccgggttacaaataccttggacccggcaacggactcgacaagggggagccggtcaacgcagcagacgcggcggccctcgagcacgacaaggcctacgaccagcagctcaaggccggagacaacccgtacctcaagtacaaccacgccgacgccgagttccaggagcggctcaaagaagatacgtcttttgggggcaacctcgggcgagcagtcttccaggccaaaaagaggcttcttgaacctcttggtctggttgaggaagcggctaagacggctcctggaaagaagaggcctgtagagcagtctcctcaggaaccggactcctccgcgggtattggcaaatcgggtgcacagcccgctaaaaagagactcaatttcggtcagactggcgacacagagtcagtcccagaccctcaaccaatcggagaacctcccgcagccccctcaggtgtgggatctcttacaatggcttcaggtggtggcgcaccagtggcagacaataacgaaggtgccgatggagtgggtagttcctcgggaaattggcattgcgattcccaatggctgggggacagagtcatcaccaccagcacccgaacctgggccctgcccacctacaacaatcacctctacaagcaaatctccaacagcacatctggaggatcttcaaatgacaacgcctacttcggctacagcaccccctgggggtattttgacttcaacagattccactgccacttctcaccacgtgactggcagcgactcatcaacaacaactggggattccggcctaagcgactcaacttcaagctcttcaacattcaggtcaaagaggttacggacaacaatggagtcaagaccatcgccaataaccttaccagcacggtccaggtcttcacggactcagactatcagctcccgtacgtgctcgggtcggctcacgagggctgcctcccgccgttcccagcggacgttttcatgattcctcagtacgggtatctgacgcttaatgatggaagccaggccgtgggtcgttcgtccttttactgcctggaatatttcccgtcgcaaatgctaagaacgggtaacaacttccagttcagctacgagtttgagaacgtacctttccatagcagctacgctcacagccaaagcctggaccgactaatgaatccactcatcgaccaatacttgtactatctctcaaagactattaacggttctggacagaatcaacaaacgctaaaattcagtgtggccggacccagcaacatggctgtccagggaagaaactacatacctggacccagctaccgacaacaacgtgtctcaaccactgtgactcaaaacaacaacagcgaatttgcttggcctagagcttcttcttgggctctcaatggacgtaatagcttgatgaatcctggacctgctatggccagccacaaagaaggagaggaccgtttctttcctttgtctggatctttaatttttggcaaacaaggaactggaagagacaacgtggatgcggacaaagtcatgataaccaacgaagaagaaattaaaactactaacccggtagcaacggagtcctatggacaagtggccacaaaccaccagagtgcccaagcacaggcgcagaccggctgggttcaaaaccaaggaatacttccgggtatggtttggcaggacagagatgtgtacctgcaaggacccatttgggccaaaattcctcacacggacggcaactttcacccttctccgctgatgggagggtttggaatgaagcacccgcctcctcagatcctcatcaaaaacacacctgtacctgcggatcctccaacggccttcaacaaggacaagctgaactctttcatcacccagtattctactggccaagtcagcgtggagatcgagtgggagcggcagaaggaaaacagcaagcgctggaacccggagatccagtacacttccaactattacaagtctaataatgttgaatttgctgttaatactgaaggtgtatatagtgaaccccgccccattggcaccagatacctgactcgtaatctgtaattgcttgttaatcaataaaccgtttaattcgtttcagttgaactgcggcc

SEQ ID NO: 861 - protein, 736 aa, Artificial Sequence
  Description of Artificial Sequence: Synthetic polypeptide
MAADGYLPDWLEDNLSEGIREWWALKPGAPQPKANQQHQDNARGLVLPGYKYLGPGNGLDKGEPVNAADAAALEHDKAYDQQLKAGDNPYLKYNHADAEFQERLKEDTSFGGNLGRAVFQAKKRLLEPLGLVEEAAKTAPGKKRPVEQSPQEPDSSAGIGKSGAQPAKKRLNFGQTGDTESVPDPQPIGEPPAAPSGVGSLTMASGGGAPVADNNEGADGVGSSSGNWHCDSQWLGDRVITTSTRTWALPTYNNHLYKQISNSTSGGSSNDNAYFGYSTPWGYFDFNRFHCHFSPRDWQRLINNNWGFRPKRLNFKLFNIQVKEVTDNNGVKTIANNLTSTVQVFTDSDYQLPYVLGSAHEGCLPPFPADVFMIPQYGYLTLNDGSQAVGRSSFYCLEYFPSQMLRTGNNFQFSYEFENVPFHSSYAHSQSLDRLMNPLIDQYLYYLSKTINGSGQNQQTLKFSVAGPSNMAVQGRNYIPGPSYRQQRVSTTVTQNNNSEFAWPRASSWALNGRNSLMNPGPAMASHKEGEDRFFPLSGSLIFGKQGTGRDNVDADKVMITNEEEIKTTNPVATESYGQVATNHQSAQAQAQTGWVQNQGILPGMVWQDRDVYLQGPIWAKIPHTDGNFHPSPLMGGFGMKHPPPQILIKNTPVPADPPTAFNKDKLNSFITQYSTGQVSVEIEWERQKENSKRWNPEIQYTSNYYKSNNVEFAVNTEGVYSEPRPIGTRYLTRNL

SEQ ID NO: 862 - DNA, 2601 bp, Artificial Sequence
  Description of Artificial Sequence: Synthetic polynucleotide
ccatcgacgtcagacgcggaagcttcgatcaactacgcggacaggtaccaaaacaaatgttctcgtcacgtgggcatgaatctgatgctgtttccctgcagacaatgcgagagactgaatcagaattcaaatatctgcttcactcacggtgtcaaagactgtttagagtgctttcccgtgtcagaatctcaacccgtttctgtcgtcaaaaaggcgtatcagaaactgtgctacattcatcacatcatgggaaaggtgccagacgcttgcactgcttgcgacctggtcaatgtggacttggatgactgtgtttctgaacaataaatgacttaaaccaggtatggctgccgatggttatcttccagattggctcgaggacaaccttagtgaaggaattcgcgagtggtgggctttgaaacctggagcccctcaacccaaggcaaatcaacaacatcaagacaacgctcgaggtcttgtgcttccgggttacaaataccttggacccggcaacggactcgacaagggggagccggtcaacgcagcagacgcggcggccctcgagcacgacaaggcctacgaccagcagctcaaggccggagacaacccgtacctcaagtacaaccacgccgacgccgagttccaggagcggctcaaagaagatacgtcttttgggggcaacctcgggcgagcagtcttccaggccaaaaagaggcttcttgaacctcttggtctggttgaggaagcggctaagacggctcctggaaagaagaggcctgtagagcagtctcctcaggaaccggactcctccgcgggtattggcaaatcgggtgcacagcccgctaaaaagagactcaatttcggtcagactggcgacacagagtcagtcccagaccctcaaccaatcggagaacctcccgcagccccctcaggtgtgggatctcttacaatggcttcaggtggtggcgcaccagtggcagacaataacgaaggtgccgatggagtgggtagttcctcgggaaattggcattgcgattcccaatggctgggggacagagtcatcaccaccagcacccgaacctgggccctgcccacctacaacaatcacctctacaagcaaatctccaacagcacatctggaggatcttcaaatgacaacgcctacttcggctacagcaccccctgggggtattttgacttcaacagattccactgccacttctcaccacgtgactggcagcgactcatcaacaacaactggggattccggcctaagcgactcaacttcaagctcttcaacattcaggtcaaagaggttacggacaacaatggagtcaagaccatcgccaataaccttaccagcacggtccaggtcttcgcggactcagactatcagctcccgtacgtgctcgggtcggctcacgagggctgcctcccgccgttcccagcggacgttttcatgattcctcagtacgggtatctgacgcttaatgatggaagccaggccgtgggtcgttcgtccttttactgcctggaatatttcccgtcgcaaatgctaagaacgggtaacaacttccagttcagctacgagtttgagaacgtacctttccatagcagctacgctcacagccaaagcctggaccgactaatgaatccactcatcgaccaatacttgtactatctctcaaagactattaacggttctggacagaatcaacaaacgctaaaattcagtgtggccggacccagcaacatggctgtccagggaagaaactacatacctggacccagctaccgacaacaacgtgtctcaaccactgtgactcaaaacaacaacagcgaatttgcttggcctagagcttcttcttgggctctcaatggacgtaatagcttgatgaatcctggacctgctatggccagccacaaagaaggagaggaccgtttctttcctttgtctggatctttaatttttggcaaacaaggaactggaagagacaacgtggatgcggacaaagtcatgataaccaacgaagaagaaattaaaactactaacccggtagcaacggagtcctatggacaagtggccacaaaccaccagagtgcccaagcacaggcgcagaccggctgggttcaaaaccaaggaatacttccgggtatggtttggcaggacagagatgtgtacctgcaaggacccatttgggccaaaattcctcacacggacggcaactttcacccttctccgctgatgggagggtttggaatgaagcacccgcctcctcagatcctcatcaaaaacacacctgtacctgcggatcctccaacggccttcaacaaggacaagctgaactctttcatcacccagtattctactggccaagtcagcgtggagatcgagtgggagctgcagaaggaaaacagcaagcgctggaacccggagatccagtacacttccaactattacaagtctaataatgttgaatttgctgttaatactgaaggtgtatatagtgaaccccgccccattggcaccagatacctgactcgtaatctgtaattgcttgttaatcaataaaccgtttaattcgtttcagttgaactgcggcc

SEQ ID NO: 863 - protein, 736 aa, Artificial Sequence
  Description of Artificial Sequence: Synthetic polypeptide
MAADGYLPDWLEDNLSEGIREWWALKPGAPQPKANQQHQDNARGLVLPGYKYLGPGNGLDKGEPVNAADAAALEHDKAYDQQLKAGDNPYLKYNHADAEFQERLKEDTSFGGNLGRAVFQAKKRLLEPLGLVEEAAKTAPGKKRPVEQSPQEPDSSAGIGKSGAQPAKKRLNFGQTGDTESVPDPQPIGEPPAAPSGVGSLTMASGGGAPVADNNEGADGVGSSSGNWHCDSQWLGDRVITTSTRTWALPTYNNHLYKQISNSTSGGSSNDNAYFGYSTPWGYFDFNRFHCHFSPRDWQRLINNNWGFRPKRLNFKLFNIQVKEVTDNNGVKTIANNLTSTVQVFADSDYQLPYVLGSAHEGCLPPFPADVFMIPQYGYLTLNDGSQAVGRSSFYCLEYFPSQMLRTGNNFQFSYEFENVPFHSSYAHSQSLDRLMNPLIDQYLYYLSKTINGSGQNQQTLKFSVAGPSNMAVQGRNYIPGPSYRQQRVSTTVTQNNNSEFAWPRASSWALNGRNSLMNPGPAMASHKEGEDRFFPLSGSLIFGKQGTGRDNVDADKVMITNEEEIKTTNPVATESYGQVATNHQSAQAQAQTGWVQNQGILPGMVWQDRDVYLQGPIWAKIPHTDGNFHPSPLMGGFGMKHPPPQILIKNTPVPADPPTAFNKDKLNSFITQYSTGQVSVEIEWELQKENSKRWNPEIQYTSNYYKSNNVEFAVNTEGVYSEPRPIGTRYLTRNL

SEQ ID NO: 864 - DNA, 2601 bp, Artificial Sequence
  Description of Artificial Sequence: Synthetic polynucleotide
ccatcgacgtcagacgcggaagcttcgatcaactacgcggacaggtaccaaaacaaatgttctcgtcacgtgggcatgaatctgatgctgtttccctgcagacaatgcgagagactgaatcagaattcaaatatctgcttcactcacggtgtcaaagactgtttagagtgctttcccgtgtcagaatctcaacccgtttctgtcgtcaaaaaggcgtatcagaaactgtgctacattcatcacatcatgggaaaggtgccagacgcttgcactgcttgcgacctggtcaatgtggacttggatgactgtgtttctgaacaataaatgacttaaaccaggtatggctgccgatggttatcttccagattggctcgaggacaaccttagtgaaggaattcgcgagtggtgggctttgaaacctggagcccctcaacccaaggcaaatcaacaacatcaagacaacgctcgaggtcttgtgcttccgggttacaaataccttggacccggcaacggactcgacaagggggagccggtcaacgcagcagacgcggcggccctcgagcacgacaaggcctacgaccagcagctcaaggccggagacaacccgtacctcaagtacaaccacgccgacgccgagttccaggagcggctcaaagaagatacgtcttttgggggcaacctcgggcgagcagtcttccaggccaaaaagaggcttcttgaacctcttggtctggttgaggaagcggctaagacggctcctggaaagaagaggcctgtagagcagtctcctcaggaaccggactcctccgcgggtattggcaaatcgggtgcacagcccgctaaaaagagactcaatttcggtcagactggcgacacagagtcagtcccagaccctcaaccaatcggagaacctcccgcagccccctcaggtgtgggatctcttacaatggcttcaggtggtggcgcaccagtggcagacaataacgaaggtgccgatggagtgggtagttcctcgggaaattggcattgcgattcccaatggctgggggacagagtcatcaccaccagcacccgaacctgggccctgcccacctacaacaatcacctctacaagcaaatctccaacagcacatctggaggatcttcaaatgacaacgcctacttcggctacagcaccccctgggggtattttgacttcaacagattccactgccacttctcaccacgtgactggcagcgactcatcaacaacaactggggattccggcctaagcgactcaacttcaagctcttcaacattcaggtcaaagaggttacggacaacaatggagtcaagaccatcgccaataaccttaccagcacggtccaggtcttcacggactcagactatcagctcccgtacgtgctcgggtcggctcacgagggctgcctcccgccgttcccagcggacgttttcatgattcctcagtacgggtatctgacgcttaatgatggaagccaggccgtgggtcgttcgtccttttactgcctggaatatttcccgtcgcaaatgctaagaacgggtaacaacttccagttcagctacgagtttgagaacgtacctttccatagcagctacgctcacagccaaagcctggaccgactaatgaatccactcatcgaccaatacttgtactatctctcaaagactattaacggttctggacagaatcaacaaacgctaaaattcagtgtggccggacccagcaacatggctgtccagggaagaaactacatacctggacccagctaccgacaacaacgtgtctcaaccactgtgactcaaaacaacaacagcgaaattgcttggcctagagcttcttcttgggctctcaatggacgtaatagcttgatgaatcctggacctgctatggccagccacaaagaaggagaggaccgtttctttcctttgtctggatctttaatttttggcaaacaaggaactggaagagacaacgtggatgcggacaaagtcatgataaccaacgaagaagaaattaaaactactaacccagtagcaacggagtcctatggacaagtggccacaaaccaccagagtgcccaagcacaggcgcagaccggctgggttcaaaaccaaggaatacttccgggtatggtttggcaggacagagatgtgtacctgcaaggacccatttgggccaaaattcctcacacggacggcaactttcacccttctccgctgatgggagggtttggaatgaagcacccgcctcctcagatcctcatcaaaaacacacctgtacctgcggatcctccaacggccttcaacaaggacaagctgaactctttcatcacccagtattctactggccaagtcagcgtggagatcgagtgggagctgcagaaggaaaacagcaagcgctggaacccggagatccagtacacttccaactattgcaagtctaataatgttgaatttgctgttaatactgaaggtgtatatagtgaaccccgccccattggcaccagatacctgactcgtaatctgtaattgcttgttaatcaataaaccgtttaattcgtttcagttgaactgcggcc

SEQ ID NO: 865 - protein, 736 aa, Artificial Sequence
  Description of Artificial Sequence: Synthetic polypeptide
MAADGYLPDWLEDNLSEGIREWWALKPGAPQPKANQQHQDNARGLVLPGYKYLGPGNGLDKGEPVNAADAAALEHDKAYDQQLKAGDNPYLKYNHADAEFQERLKEDTSFGGNLGRAVFQAKKRLLEPLGLVEEAAKTAPGKKRPVEQSPQEPDSSAGIGKSGAQPAKKRLNFGQTGDTESVPDPQPIGEPPAAPSGVGSLTMASGGGAPVADNNEGADGVGSSSGNWHCDSQWLGDRVITTSTRTWALPTYNNHLYKQISNSTSGGSSNDNAYFGYSTPWGYFDFNRFHCHFSPRDWQRLINNNWGFRPKRLNFKLFNIQVKEVTDNNGVKTIANNLTSTVQVFTDSDYQLPYVLGSAHEGCLPPFPADVFMIPQYGYLTLNDGSQAVGRSSFYCLEYFPSQMLRTGNNFQFSYEFENVPFHSSYAHSQSLDRLMNPLIDQYLYYLSKTINGSGQNQQTLKFSVAGPSNMAVQGRNYIPGPSYRQQRVSTTVTQNNNSEIAWPRASSWALNGRNSLMNPGPAMASHKEGEDRFFPLSGSLIFGKQGTGRDNVDADKVMITNEEEIKTTNPVATESYGQVATNHQSAQAQAQTGWVQNQGILPGMVWQDRDVYLQGPIWAKIPHTDGNFHPSPLMGGFGMKHPPPQILIKNTPVPADPPTAFNKDKLNSFITQYSTGQVSVEIEWELQKENSKRWNPEIQYTSNYCKSNNVEFAVNTEGVYSEPRPIGTRYLTRNL

SEQ ID NO: 866 - DNA, 2601 bp, Artificial Sequence
  Description of Artificial Sequence: Synthetic polynucleotide
ccatcgacgtcagacgcggaagcttcgatcaactacgcggacaggtaccaaaacaaatgttctcgtcacgtgggcatgaatctgatgctgtttccctgcagacaatgcgagagactgaatcagaattcaaatatctgcttcactcacggtgtcaaagactgtttagagtgctttcccgtgtcagaatctcaacccgtttctgtcgtcaaaaaggcgtatcagaaactgtgctacattcatcacatcatgggaaaggtgccagacgcttgcactgcttgcgacctggtcaatgtggacttggatgtctgtgtttctgaacaataaatgacttaaaccaggtatggctgccgatggttatcttccagattggctcgaggacaaccttagtgaaggaattcgcgagtggtgggctttgaaacctggagcccctcaacccaaggcaaatcaacaacatcaagacaacgctcgaggtcttgtgcttccgggttacaaataccttggacccggcaacggactcgataagggggagccggtcaacgcagcagacgcggcggccctcgagcacgacaaggcctacgaccagcagctcaaggccggagacaacccgtacctcaagtacaaccacgccgacgccgagttccaggagcggctcaaagaagatacgtcttttgggggcaacctcgggcgagcagtcttccaggccaaaaagaggcttcttgaacctcttggtctggttgaggaagcggctaagacggctcctggaaagaagaggcctgtagagcagtctcctcaggaaccggactcctccgcgggtattggcaaatcgggtgcacagcccgctaaaaagagactcaatttcggtcagactggcgacacagagtcagtcccagaccctcaaccaatcggagaacctcccgcagccccctcaggtgtgggatctcttacaatggcttcaggtggtggcgcaccagtggcagacaataacgaaggtgccgatggagtgggtagttcctcgggaaattggcattgcgattcccaatggctgggggacagagtcatcaccaccagcacccgaacctgggccctgcccacctacaacaatcacctctacaagcaaatctccaacagcacatctggaggatcttcaaatgacaacgcctacttcggctacagcaccccctgggggtattttgacttcaacagattccactgccacttctcaccacgtgactggcagcgactcatcaacaacaactggggattccggcctaagcgactcaacttcaagctcttcaacattcaggtcaaagaggttacggacaacaatggagtcaagaccatcgccaataaccttaccagcacggtccaggtcttcacggactcagactatcagctcccgtacgtgctcgggtcggctcacgagggctgcctcccgccgttcccagcggacgttttcatgattcctcagtacgggtatctgacgcttaatgatggaagccaggccgtgggtcgttcgtccttttactgcctggaatatttcccgtcgcaaatgctaagaacgggtaacaacttccagttcagctacgagtttgagaacgtacctttccatagcagctacgctcacagccaaagcctggaccgactaatgaatccactcatcgaccaatacttgtactatctctcaaagactattaacggttctggacagaatcaacaaacgctaaaattcagtgtggccggacccagcaacatggctgtccagggaagaaactacatacctggacccagctaccgacaacaacgtgtctcaaccactgtgactcaaaacaacaacagcgaatttgcttggcctagagcttcttcttgggctctcaatggacgtaatagcttgatgaatcctggacctgctatggccagccacaaagaaggagaggaccgtttctttcctttgtctggatctttaatttttggcaaacaaggaactggaagagacaacgtggatgcggacaaagtcatgataaccaacgaagaagaaattaaaactactaacccggtagcaacggagtcctatggacaagtggccacaaaccaccagagtgcccaagcacaggcgcagaccggctgggttcaaaaccaaggaatacttccgggtatggtttggcaggacagagatgtgtacctgcaaggacccatttgggccaaaattcctcacacggacggcaactttcacccttctccgctgatgggagggtttggaatgaagcacccgcctcctcagatcctcatcaaaaacacacctgtacctgcggatcctccaacggccttcaacaaggacaagctgaactctttcatcacccagtattctactggccaagtcagcgtggagatcgagtgggagctgcagaaggaaaacagcaagcgctggaacccggagatccagtacacttccaactattacaagtctaataatgttgaatttgctgttaatactgaaggtgtatatagtgaaccccgccccattggcaccagatacctgactcgtaatctgtaattgcttgttaatcaataaaccgtttaattcgtttcagttgaactgcggcc

SEQ ID NO: 867 - protein, 736 aa, Artificial Sequence; identical to SEQ ID NO: 859
  Description of Artificial Sequence: Synthetic polypeptide

SEQ ID NO: 868 - DNA, 2601 bp, Artificial Sequence
  Description of Artificial Sequence: Synthetic polynucleotide
ccatcgacgtcagacgcggaagcttcgatcaactacgcggacaggtaccaaaacaaatgttctcgtcacgtgggcatgaatctgatgctgtttccctgcagacaatgcgagagactgaatcagaattcaaatatctgcttcactcacggtgtcaaagactgtttagagtgctttcccgtgtcagaatctcaacccgtttctgtcgtcaaaaaggcgtatcagaaactgtgctacattcatcacatcatgggaaaggtgccagacgcttgcactgcttgcgacctggtcaatgtggacttggatgactgtgtttctgaacaataaatgacttaaaccaggtatggctgccgatggttatcttccagattggctcgaggacaaccttagtgaaggaattcgcgagtggtgggctttgaaacctggagcccctcaacccaaggcaaatcaacaacatcaagacaacgctcgaggtcttgtgcttccgggttacaaataccttggacccggcaacggactcgacaagggggagccggtcaacgcagcagacgcggcggccctcgagcacgacaaggcctacgaccagcagctcaaggccggagacaacccgtacctcaagtacaaccacgccgacgccgagttccaggagcggctcaaagaagatacgtcttttgggggcaacctcgggcgagcagtcttccaggccaaaaagaggcttcttgaacctcttggtctggttgaggaagcggctaagacggctcctggaaagaagaggcctgtagagcagtctcctcaggaaccggactcctccgcgggtattggcaaatcgggtgcacagcccgctaaaaagagactcaatttcggtcagactggcgacacagagtcagtcccagaccctcaaccaatcggagaacctcccgcagccccctcaggtgtgggatctcttacaatggcttcaggtggtggcgcaccagtggcagacaataacgaaggtgccgatggagtgggtagttcctcgggaaattggcattgcgattcccaatggctgggggacagagtcatcaccaccagcacccgaacctgggccctgcccacctacaacaatcacctctacaagcaaatctccaacagcacatctggaggatcttcaaatgacaacgcctacttcggctacagcaccccctgggggtattttgacttcaacagattccactgccacttctcaccacgtgactggcagcgactcatcaacaacaactggggattccggcctaagcgactcaacttcaagctcttcaacattcaggtcaaagaggttacggacaacaatggagtcaagaccatcgccaataaccttaccagcacggtccaggtcttcacggactcagactatcagctcccgtacgtgctcgggtcggctcacgagggctgcctcccgccgttcccagcggacgttttcatgattcctcagtacgggtatctgacgcttaatgatggaagccaggccgtgggtcgttcgtccttttactgcctggaatatttcccgtcgcaaatgctaagaacgggtaacaacttccagttcagctacgagtttgagaacgtacctttccatagcagctacgctcacagccaaagcctggaccgactaatgaatccactcatcgaccaatacttgtactatctctcaaagactattaacggttctggacagaatcaacaaacgctaaaattcagtgtggccggacccagcaacatggctgtccagggaagaaactacatacctggacccagctaccgacaacaacgtgtctcaaccactgtgactcaaaacaacaacagcgaatttgcttggcctggggcttcttcttgggctctcaatggacgtaatagcttgatgaatcctggacctgctatggccagccacaaagaaggagaggaccgtttctttcctttgtctggatctttaatttttggcaaacaaggaactggaagagacaacgtggatgcggacaaagtcatgataaccaacgaagaagaaattaaaactactaacccggtagcaacggagtcctatggacaagtggccacaaaccaccagagtgcccaagcacaggcgcagaccggctgggttcaaaaccaaggaatacttccgggtatggtttggcaggacagagatgtgtacctgcaaggacccatttgggccaaaattcctcacacgggcggcaactttcacccttctccgctgatgggagggtttggaatgaagcacccgcctcctcagatcctcatcaaaaacacacctgtacctgcggatcctccaacggccttcaacaaggacaagctgaactctttcatcacccagtattctactggccaagtcagcgtggagatcgagtgggagctgcagaaggaaaacagcaagcgctggaacccggagatccagtacacttccaactattacaagtctaataatgttgaatttgctgttaatactggaggtgtatatagtgaaccccgccccattggcaccagatacctgactcgtaatctgtaattgcttgttaatcaataaaccgtttaattcgtttcagttgaactgcggcc

SEQ ID NO: 869 - protein, 736 aa, Artificial Sequence
  Description of Artificial Sequence: Synthetic polypeptide
MAADGYLPDWLEDNLSEGIREWWALKPGAPQPKANQQHQDNARGLVLPGYKYLGPGNGLDKGEPVNAADAAALEHDKAYDQQLKAGDNPYLKYNHADAEFQERLKEDTSFGGNLGRAVFQAKKRLLEPLGLVEEAAKTAPGKKRPVEQSPQEPDSSAGIGKSGAQPAKKRLNFGQTGDTESVPDPQPIGEPPAAPSGVGSLTMASGGGAPVADNNEGADGVGSSSGNWHCDSQWLGDRVITTSTRTWALPTYNNHLYKQISNSTSGGSSNDNAYFGYSTPWGYFDFNRFHCHFSPRDWQRLINNNWGFRPKRLNFKLFNIQVKEVTDNNGVKTIANNLTSTVQVFTDSDYQLPYVLGSAHEGCLPPFPADVFMIPQYGYLTLNDGSQAVGRSSFYCLEYFPSQMLRTGNNFQFSYEFENVPFHSSYAHSQSLDRLMNPLIDQYLYYLSKTINGSGQNQQTLKFSVAGPSNMAVQGRNYIPGPSYRQQRVSTTVTQNNNSEFAWPGASSWALNGRNSLMNPGPAMASHKEGEDRFFPLSGSLIFGKQGTGRDNVDADKVMITNEEEIKTTNPVATESYGQVATNHQSAQAQAQTGWVQNQGILPGMVWQDRDVYLQGPIWAKIPHTGGNFHPSPLMGGFGMKHPPPQILIKNTPVPADPPTAFNKDKLNSFITQYSTGQVSVEIEWELQKENSKRWNPEIQYTSNYYKSNNVEFAVNTGGVYSEPRPIGTRYLTRNL

SEQ ID NO: 870 - DNA, 2601 bp, Artificial Sequence
  Description of Artificial Sequence: Synthetic polynucleotide
ccatcgacgtcagacgcggaagcttcgatcaactacgcggacaggtaccaaaacaaatgttctcgtcacgtgggcatgaatctgatgctgtttccctgcagacaatgcgagagactgaatcagaattcaaatatctgcttcactcacggtgtcaaagactgtttagagtgctttcccgtgtcagaatctcaacccgtttctgtcgtcaaaaaggcgtatcagaaactgtgctacattcatcacatcatgggaaaggtgccagacgcttgcactgcttgcgacctggtcaatgtggactcggatgactgtgtttctgaacaataaatgacttaaaccaggtatggctgccgatggttatcttccagattggctcgaggacaaccttagtgaaggaattcgcgagtggtgggctttgaaacctggagcccctcaacccaaggcaaatcaacaacatcaagacaacgctcgaggtcttgtgcttccgggttacaaataccttggacccggcaacggactcgacaagggggagccggtcaacgcagcagacgcggcggccctcgagcacgacaaggcctacgaccagcagctcaaggccggagacaacccgtacctcaagtacaaccacgccgacgccgagttccaggagcggctcaaagaagatacgtcttttgggggcaacctcgggcgagcagtcttccaggccaaaaagaggcttcttgaacctcttggtctggttgaggaagcggctaagacggctcctggaaagaagaggcctgtagagcagtctcctcaggaaccggactcctccgcgggtattgacaaatcgggtgcacagcccgctaaaaagagactcaatttcggtcagactggcgacacagagtcagtcccagaccctcaaccaatcggagaacctcccgcagccccctcaggtgtgggatctcttacaatggcttcaggtggtggcgcaccagtggcagacaataacgaaggtgccgatggagtgggtagttcctcgggaaattggcattgcgattcccaatggctgggggacagagtcatcaccaccagcacccgaacctgggccctgcccacctacaacaatcacctctacaagcaaatctccaacagcacatctggaggatcttcaaatgacaacgcctacttcggctacagcaccccctgggggtattttgacttcaacagattccactgccacttctcaccacgtgactggcagcgactcatcaacaacaactggggattccggcctaagcgactcaacttcaagctcttcaacattcaggtcaaagaggttacggacaacaatggagtcaagaccatcgccaataaccttaccagcacggtccaggtcttcacggactcggactatcagctcccgtacgtgctcgggtcggctcacgagggctgcctcccgccgttcccagcggacgttttcatgattcctcagtacgggtatctgacgcttaatgatggaagccaggccgtgggtcgttcgtccttttactgcctggaatatttcccgtcgcaaatgctaagaacgggtaacaacttccagttcagctacgagtttgagaacgtacctttccatagcagctacgctcacagccaaagcctggaccgactaatgaatccactcatcgaccaatacttgtactatctctcaaagactattaacggttctggacagaatcaacaaacgctaaaattcagtgtggccggacccagcaacatggctgtccagggaagaaactacatacctggacccagctaccgacaacaacgtgtctcaaccactgtgactcaaaacaacaacagcgaatttgcttggcctggagcttcttcttgggctctcaatggacgtaatagcttgatgaatcctggacctgctatggccagccacaaagaaggagaggaccgtttctttcctttgtctggatctttaatttttggcaaacaaggaactggaagagacaacgtggatgcggacaaagtcatgataaccaacgaagaagaaattaaaactactaacccggtagcaacggagtcctatggacaagtggccacaaaccaccagagtgcccaagcacaggcgcagaccggctgggttcaaaaccaaggaatacttccgggtatggtttggcaggacagagatgtgtacctgcaaggacccatttgggccaaaattcctcacacggacggcaactttcacccttctccgctgatgggagggtttggaatgaagcacccgcctcctcagatcctcatcaaaaacacacctgtacctgcggatcctccaacggccttcaacaaggacaagctgaactctttcatcacccagtattctactggccaagtcagcgtggagatcgagtgggagctgcagaaggaaaacagcaagcgctggaacccggagatccagtacacttccaactattacaagtctaataatgttgaatttgctgttaatactgaaggtgtatatagtgaaccccgccccattggcaccagatacctgactcgtaatctgtaattgcttgttaatcaataaaccgtttaattcgtttcagttgaactgcggcc

SEQ ID NO: 871 - protein, 736 aa, Artificial Sequence
  Description of Artificial Sequence: Synthetic polypeptide
MAADGYLPDWLEDNLSEGIREWWALKPGAPQPKANQQHQDNARGLVLPGYKYLGPGNGLDKGEPVNAADAAALEHDKAYDQQLKAGDNPYLKYNHADAEFQERLKEDTSFGGNLGRAVFQAKKRLLEPLGLVEEAAKTAPGKKRPVEQSPQEPDSSAGIDKSGAQPAKKRLNFGQTGDTESVPDPQPIGEPPAAPSGVGSLTMASGGGAPVADNNEGADGVGSSSGNWHCDSQWLGDRVITTSTRTWALPTYNNHLYKQISNSTSGGSSNDNAYFGYSTPWGYFDFNRFHCHFSPRDWQRLINNNWGFRPKRLNFKLFNIQVKEVTDNNGVKTIANNLTSTVQVFTDSDYQLPYVLGSAHEGCLPPFPADVFMIPQYGYLTLNDGSQAVGRSSFYCLEYFPSQMLRTGNNFQFSYEFENVPFHSSYAHSQSLDRLMNPLIDQYLYYLSKTINGSGQNQQTLKFSVAGPSNMAVQGRNYIPGPSYRQQRVSTTVTQNNNSEFAWPGASSWALNGRNSLMNPGPAMASHKEGEDRFFPLSGSLIFGKQGTGRDNVDADKVMITNEEEIKTTNPVATESYGQVATNHQSAQAQAQTGWVQNQGILPGMVWQDRDVYLQGPIWAKIPHTDGNFHPSPLMGGFGMKHPPPQILIKNTPVPADPPTAFNKDKLNSFITQYSTGQVSVEIEWELQKENSKRWNPEIQYTSNYYKSNNVEFAVNTEGVYSEPRPIGTRYLTRNL

SEQ ID NO: 872 - DNA, 2601 bp, Artificial Sequence
  Description of Artificial Sequence: Synthetic polynucleotide
ccatcgacgtcagacgcggaagcttcgatcaactacgcggacaggtaccaaaacaaatgttctcgtcacgtgggcatgaatctgatgctgtttccctgcagacaatgcgagagactgaatcagaattcaaatatctgcttcactcacggtgtcaaagactgtttagagtgctttcccgtgtcagaatctcaacccgtttctgtcgtcaaaaaggcgtatcagaaactgtgctacattcatcacatcatgggaaaggtgccagacgcttgcactgcttgcgacctggtcaatgtggacttggatgactgtgtttctgaacaataaatgacttaaaccaggtatggctgccgatggttatcttccagattggctcgaggacaaccttagtgaaggaattcgcgagtggtgggctttgaaacctggagcccctcaacccaaggcaaatcaacaacatcaagacaacgctcgaggtcttgtgcttccgggttacaaataccttggacccggcaacggactcgacaagggggagccggtcaacgcagcagacgcggcggccctcgagcacgacaaggcctacgaccagcagctcaaggccggagacaacccgtacctcaagtacaaccacgccgacgccgagttccaggagcggctcaaagaagatacgtcttttgggggcaacctcgggcgagcagtcctccaggccaaaaagaggcttcttgaacctcttggtctggttgaggaagcggctaagacggctcctggaaagaagaggcctgtagagcagtctcctcaggaaccggactcctccgcgggtattggcaaatcgggtgcacagcccgctaaaaagagactcaatttcggtcagactggcgacacagagtcagtcccagaccctcaaccaatcggagaacctcccgcagccccctcaggtgtgggatctcttacaatggcttcaggtggtggcgcaccagtggcagacaataacgaaggtgccgatggagtgggtagttcctcgggaaattggcattgcgattcccaatggctgggggacagagtcatcaccaccagcacccgaacctgggccctgcccacctacaacaatcacctctacaagcaaatctccaacagcacatctggaggatcttcaaatgacaacgcctacttcggctacagcaccccctgggggtattttgacttcaacagattccactgccacttctcaccacgtgactggcagcgactcatcaacaacaactggggattccggcctaagcgactcaacttcaagctcttcaacattcaggtcaaagaggttacggacaacaatggagtcaagaccatcgccaataaccttaccagcacggtccaggtcttcacggactcagactatcagctcccgtacgtgctcgggtcggctcacgagggctgcctcccgccgttcccagcggacgttttcatgattcctcagtacgggtatctgacgcttaatgatggaagccaggccgtgggtcgttcgtccttttactgcctggaatatttcccgtcgcaaatgctaagaacgggtaacaacttccagttcagctacgagtttgagaacgtacctttccatagcagctacgctcacagccaaagcctggaccgactaatgaatccactcatcgaccaatacttgtactatctctcaaagactattaacggttctggacagaatcaacaaacgctaaaattcagtgtggccggatccagcaacatggctgtccagggaagaaactacatacctggacccagctaccgacaacaacgtgtctcaaccactgtgactcaaaacaacaacagcgaatttgcttggcctggagcttcttcttgggctctcaatggacgtaatagcttgatgaatcctggacctgctatggccagccacaaagaaggagaggaccgtttctttcctttgtctggatctttaatttttggcaaacaaggaactggaagagacaacgtggatgcggacaaagtcatgataaccaacgaagaagaaattaaaactactaacccggtagcaacggagtcctatggacaagtggccacaaaccaccagagtgcccaagcacaggcgcagaccggctgggttcaaaaccaaggaatacttccaggtatggtttggcaggacagagatgtgtacctgcaaggacccatttgggccaaaattcctcacacggacggcaactttcacccttctccgctgatgggagggtttggaatgaagcacccgcctcctcagatcctcatcaaaaacacacctgtacctgcggatcctccaacggccttcaacaaggacaagctgaactctttcatcacccagtattctactggccaagtcagcgtggagatcgagtgggagctgcagaaggaaaacagcaagcgctggaacccggagatccagtacacttccaactattacaagtctaataatgttgaatttgctgttaatactgaaggtgtatatagtgaaccccgccccattggcaccagatacctgactcgtaatctgtaattgcttgttaatcaataaaccgtttaattcgtttcagttgaactgcggcc

SEQ ID NO: 873 - protein, 736 aa, Artificial Sequence
  Description of Artificial Sequence: Synthetic polypeptide
MAADGYLPDWLEDNLSEGIREWWALKPGAPQPKANQQHQDNARGLVLPGYKYLGPGNGLDKGEPVNAADAAALEHDKAYDQQLKAGDNPYLKYNHADAEFQERLKEDTSFGGNLGRAVLQAKKRLLEPLGLVEEAAKTAPGKKRPVEQSPQEPDSSAGIGKSGAQPAKKRLNFGQTGDTESVPDPQPIGEPPAAPSGVGSLTMASGGGAPVADNNEGADGVGSSSGNWHCDSQWLGDRVITTSTRTWALPTYNNHLYKQISNSTSGGSSNDNAYFGYSTPWGYFDFNRFHCHFSPRDWQRLINNNWGFRPKRLNFKLFNIQVKEVTDNNGVKTIANNLTSTVQVFTDSDYQLPYVLGSAHEGCLPPFPADVFMIPQYGYLTLNDGSQAVGRSSFYCLEYFPSQMLRTGNNFQFSYEFENVPFHSSYAHSQSLDRLMNPLIDQYLYYLSKTINGSGQNQQTLKFSVAGSSNMAVQGRNYIPGPSYRQQRVSTTVTQNNNSEFAWPGASSWALNGRNSLMNPGPAMASHKEGEDRFFPLSGSLIFGKQGTGRDNVDADKVMITNEEEIKTTNPVATESYGQVATNHQSAQAQAQTGWVQNQGILPGMVWQDRDVYLQGPIWAKIPHTDGNFHPSPLMGGFGMKHPPPQILIKNTPVPADPPTAFNKDKLNSFITQYSTGQVSVEIEWELQKENSKRWNPEIQYTSNYYKSNNVEFAVNTEGVYSEPRPIGTRYLTRNL

SEQ ID NO: 874 - DNA, 2601 bp, Artificial Sequence
  Description of Artificial Sequence: Synthetic polynucleotide
ccatcgacgtcagacgcggaagcttcgatcaactacgcggacaggtaccaaaacaaatgttctcgtcacgtgggcatgaatctgatgctgtttccctgcagacaatgcgagagactgaatcagaattcaaatatctgcttcactcacggtgtcaaagactgtttagagtgctttcccgtgtcagaatctcaacccgtttctgtcgtcaaaaaggcgtatcagaaactgtgctacattcatcacatcatgggaaaggtgccagacgcttgcactgcttgcgacctggtcaatgtggacttggatgactgtgtttctgaacaataaatgacttaaaccaggtatggctgccgatggttatcttccagattggctcgaggacaaccttagtgaaggaattcgcgagtggtgggctttgaaacctggagcccctcaacccaaggcaaatcaacaacatcaagacaacgctcgaggtcttgtgcttccgggttacaaataccttggacccggcaacggactcgacaagggggagccggtcaacgcagcagacgcggcggccctcgagcacgacagggcctacgaccagcagctcaaggccggagacaacccgtacctcaagtacaaccacgccgacgccgagttccaggagcggctcaaagaagatacgtcttttgggggcaacctcgggcgagcagtcttccaggccaaaaagaggcttcttgaacctcttggtctggttgaggaagcggctaagacggctcctggaaagaagaggcctgtagagcagtctcctcaggaaccggactcctccgcgggtattggcaaatcgggtgcacagcccgctaaaaagagactcaatttcggtcagactggcgacacagagtcagtcccagaccctcaaccaatcggagaacctcccgcagccccctcaggtgtgggatctcttacaatggcttcaggtggtggcgcaccagtggcagacaataacgaaggtgccgatggagtgggtagttcctcgggaaattggcattgcgattcccaatggctgggggacagagtcatcaccaccagcacccgaacctgggccctgcccacctacaacaatcacctctacaagcaaatctccaacagcacatctggaggatcttcaaatgacaacgcctacttcggctacagcaccccctgggggtattttgacttcaacagattccactgccacttctcaccacgtgactggcagcgactcatcaacaacaactggggattccggcctaagcgactcaacttcaagctcttcaacattcaggtcaaagaggttacggacaacaatggagtcaagaccatcgccaataaccttaccagcacggtccaggtcttcacggactcagactatcagctcccgtacgtgctcgggtcggctcacgagggctgcctcccgccgttcccagcggacgttttcatgattcctcagtacgggtatctgacgcttaatgatggaagccaggccgtgggtcgttcgtccttttactgcctggaatatttcccgtcgcaaatgctaagaacgggtaacaacttccagttcagctacgagtttgagaacgtacctttccatagcagctacgctcacagccaaagcctggaccgactaatgaatccactcatcgaccaatacttgtactatctctcaaagactattaacggttctggacagaatcaacaaacgctaaaattcagtgtggccggacctagcaacatggctgtccagggaagaaactacatacctggacccagctaccgacaacaacgtgtctcaaccactgtgactcaaaacaacaacagcgaatttgcttggcctggagcttcttcttgggctctcaatggacgtaatagcttgatgaatcctggacctgctatggccagccacaaagaaggagaggaccgtttctttcctttgtctggatctttaatttttggcaaacaaggaactggaagagacaacgtggatgcggacaaagtcatgataaccaacgaagaagaaattaaaactactaacccggtagcaacggagtcctatggacaagtggccacaaaccaccagagtgcccaagcacaggcgcagaccggctgggttcaaaaccaaggaatacttccgggtatggtttggcaggacagagatgtgtacctgcaaggacccatttgggccaaaattcctcacacggacggcaactttcacccttctccgctgatgggagggtttggaatgaagcacccgcctcctcagatcctcatcaaaaacacacctgtacctgcggatcctccaacggccttcaacaaggacaagctgaactctttcatcacccagtattctactggccaagtcagcgtggagatcgagtgggagctgcagaagaaaaacagcaagcgctggaacccggagatccagtacacttccaactattacaagtctaataatgttgaatttgctgttaacactgaaggtgtatatagtgaaccccgccccattggcaccagatacctgactcgtaatctgtaattgcttgttaatcaataaaccgtttaattcgtttcagttgaactgcggcc

SEQ ID NO: 875 - protein, 736 aa, Artificial Sequence
  Description of Artificial Sequence: Synthetic polypeptide
MAADGYLPDWLEDNLSEGIREWWALKPGAPQPKANQQHQDNARGLVLPGYKYLGPGNGLDKGEPVNAADAAALEHDRAYDQQLKAGDNPYLKYNHADAEFQERLKEDTSFGGNLGRAVFQAKKRLLEPLGLVEEAAKTAPGKKRPVEQSPQEPDSSAGIGKSGAQPAKKRLNFGQTGDTESVPDPQPIGEPPAAPSGVGSLTMASGGGAPVADNNEGADGVGSSSGNWHCDSQWLGDRVITTSTRTWALPTYNNHLYKQISNSTSGGSSNDNAYFGYSTPWGYFDFNRFHCHFSPRDWQRLINNNWGFRPKRLNFKLFNIQVKEVTDNNGVKTIANNLTSTVQVFTDSDYQLPYVLGSAHEGCLPPFPADVFMIPQYGYLTLNDGSQAVGRSSFYCLEYFPSQMLRTGNNFQFSYEFENVPFHSSYAHSQSLDRLMNPLIDQYLYYLSKTINGSGQNQQTLKFSVAGPSNMAVQGRNYIPGPSYRQQRVSTTVTQNNNSEFAWPGASSWALNGRNSLMNPGPAMASHKEGEDRFFPLSGSLIFGKQGTGRDNVDADKVMITNEEEIKTTNPVATESYGQVATNHQSAQAQAQTGWVQNQGILPGMVWQDRDVYLQGPIWAKIPHTDGNFHPSPLMGGFGMKHPPPQILIKNTPVPADPPTAFNKDKLNSFITQYSTGQVSVEIEWELQKKNSKRWNPEIQYTSNYYKSNNVEFAVNTEGVYSEPRPIGTRYLTRNL

SEQ ID NO: 876 - DNA, 2601 bp, Artificial Sequence
  Description of Artificial Sequence: Synthetic polynucleotide
ccatcgacgtcagacgcggaagcttcgatcaactacgcggacaggtaccaaaacaaatgttctcgtcacgtgggcatgaatctgatgctgtttccctgcagacaatgcgagagactgaatcagaattcaaatatctgcttcactcacggtgtcaaagactgtttagagtgctttcccgtgtcagaatctcaacccgtttctgtcgtcaaaaaggcgtatcagaaactgtgctacattcatcacatcatgggaaaggtgccagacgcttgcactgcttgcgacctggtcaatgtggacttggatgactgtgtttctgaacaataaatgacttaaaccaggtatggctgccgatggttatcttccagattggctcgaggacaaccttagtgaaggaattcgcgagtggtgggctttgaaacctggagcccctcaacccaaggcaaatcaacaacatcaagacaacgctcgaggtcttgtgcttccgggttacaaataccttggacccggcaacggactcgacaagggggagccggtcaacgcagcagacgcggcggccctcgagcacgacaaggcctacgaccagcagctcaaggccggagacaacccgtacctcaagtacaaccacgccgacgccgagttccaggagcggctcaaagaagatacgtcttttgggggcaacctcgggcgagcagtcttccaggccaaaaagaggcttcttgaacctcttggtctggttgaggaagcggctaagacggctcctggaaagaagaggcctgtagagcagtctcctcaggaaccggactcctccgcgggtattggcaaatcgggtgcacagcccgctaaaaagagactcaatttcggtcagactggcgacacagagtcagtcccagaccctcaaccaatcggagaacctcccgcagccccctcaggtgtgggatctcttacaatggcttcaggtggtggcgcaccagtggcagacaataacgaaggtgccgatggagtgggtagttcctcgggaaattggcattgcgattcccaatggctgggggacagagtcatcaccaccagcacccgaacctgggccctgcccacctacaacaatcacctctacaagcaaatctccaacagcacatctggaggatcttcaaatgacaacgcctacttcggctacagcaccccctgggggtattttgacttcaacagattccactgccacttctcaccacgtgactggcagcgactcatcaacaacaactggggattccggcctaagcgactcaacttcaagctcttcaacattcaggtcaaagaggttacggacaacaatggagtcaagaccatcgccaataaccttaccagcacggtccaggtcttcacggactcagactatcagctcccgtacgtgctcgggtcggctcacgagggctgcctcccgccgttcccagcggacgttttcatgattcctcagtacgggtatctgacgcttaatgatggaagccaggccgtgggtcgttcgtccttttactgcctggaatatttcccgtcgcaaatgctaagaacgggtaacaacttccagttcagctacgagtttgagaacgtacctttccatagcagctacgctcacagccaaagcctggaccgactaatgaatccactcatcgaccaatacttgtactatctctcaaagactattaacggttctggacagaatcaacaaacgctaaaattcagtgtggccggacccagcaacatggctgtccagggaagaaactacatacctggacccagctaccgacaacaacgtgtctcaaccactgtgactcaaaacaacaacagcgaatttgcttggcctggagcttcttcttgggctctcaatggacgtaatagcttgatgaatcctggacctgctatggccagccacaaagaaggagaggaccgtttctttcctttgtctggatctttaatttttggcaaacaaggaactggaagagacaacgtggatgcggacaaagtcatgataaccaacgaagaagaaattaaaactactaacccggtagcaacggagtcctatggacaagtggccacaaaccaccagagtgcccaagcacgggcgcagaccggctgggttcaaaaccaaggaatacttccgggtatggtttggcaggacagagatgtgtacctgcaaggacccatttgggccaaaattcctcacacggacggcaactttcacccttctccgctgatgggagggtttggaatgaagcacccgcctcctcagatcctcatcaaaaacacacctgtacctgcggatcctccaacggccttcaacaaggacaagctgaactctttcatcacccagtattctactggccaagtcagcgtggagatcgagtgggagctgcagaaggaaaacagcaagcgctggaacccggagatccagtacacttccaactattacaagtctaataatgttgaatttgctgttaatactgaaggtgtatatagtgaaccccgccccattggcaccagatacctgactcgtaatctgtaattgcttgttaatcaataaaccgtttaattcgtttcagttgaactgcggcc

SEQ ID NO: 877 - protein, 736 aa, Artificial Sequence
  Description of Artificial Sequence: Synthetic polypeptide
MAADGYLPDWLEDNLSEGIREWWALKPGAPQPKANQQHQDNARGLVLPGYKYLGPGNGLDKGEPVNAADAAALEHDKAYDQQLKAGDNPYLKYNHADAEFQERLKEDTSFGGNLGRAVFQAKKRLLEPLGLVEEAAKTAPGKKRPVEQSPQEPDSSAGIGKSGAQPAKKRLNFGQTGDTESVPDPQPIGEPPAAPSGVGSLTMASGGGAPVADNNEGADGVGSSSGNWHCDSQWLGDRVITTSTRTWALPTYNNHLYKQISNSTSGGSSNDNAYFGYSTPWGYFDFNRFHCHFSPRDWQRLINNNWGFRPKRLNFKLFNIQVKEVTDNNGVKTIANNLTSTVQVFTDSDYQLPYVLGSAHEGCLPPFPADVFMIPQYGYLTLNDGSQAVGRSSFYCLEYFPSQMLRTGNNFQFSYEFENVPFHSSYAHSQSLDRLMNPLIDQYLYYLSKTINGSGQNQQTLKFSVAGPSNMAVQGRNYIPGPSYRQQRVSTTVTQNNNSEFAWPGASSWALNGRNSLMNPGPAMASHKEGEDRFFPLSGSLIFGKQGTGRDNVDADKVMITNEEEIKTTNPVATESYGQVATNHQSAQARAQTGWVQNQGILPGMVWQDRDVYLQGPIWAKIPHTDGNFHPSPLMGGFGMKHPPPQILIKNTPVPADPPTAFNKDKLNSFITQYSTGQVSVEIEWELQKENSKRWNPEIQYTSNYYKSNNVEFAVNTEGVYSEPRPIGTRYLTRNL

SEQ ID NO: 878 - DNA, 2601 bp, Artificial Sequence
  Description of Artificial Sequence: Synthetic polynucleotide
ccatcgacgtcagacgcggaagcttcgatcaactacgcggacaggtaccaaaacaaatgttctcgtcacgtgggcatgaatctgatgctgtttccctgcagacaatgcgagagactgaatcagaattcaaatatctgcttcactcacggtgtcaaagactgtttagagtgctttcccgtgtcagaatctcaacccgtttctgtcgtcaaaaaggcgtatcagaaactgtgctacattcatcacatcatgggaaaggtgccagacgcttgcactgcttgcgacctggtcaatgtggacttggatgactgtgtttctgaacaataaatgacttaaaccaggtatggctgccgatggttatcttccagattggctcgaggacaaccttagtgaaggaattcgcgagtggtgggctttgaaacctggagcccctcaacccaaggcaaatcaacaacatcaagacaacgctcgaggtcttgtgcttccgggttacaaataccttggacccggcaacggactcgacaagggggagccggtcaacgcagtagacgcggcggccctcgagcacgacaaggcctacgaccagcagctcaaggccggagacaacccgtacctcaagtacaaccacgccgacgccgagttccaggagcggctcaaagaagatacgtcttttgggggcaacctcgggcgagcagtcttccaggccaaaaagaggcttcttgaacctcttggtctggttgaggaagcggctaagacggctcctggaaagaagaggcctgtagagcagtctcctcaggaaccggactcctccgcgggtattggcaaatcgggtgcacagcccgctaaaaagagactcaatttcggtcagactggcgacacagagtcagtcccagaccctcaaccaatcggagaacctcccgcagccccctcaggtgtgggatctcttacaatggcttcaggtggtggcgcaccagtggcagacaataacgaaggtgccgatggagtgggtagttcctcgggaaattggcattgcgattcccaatggctgggggacagagtcatcaccaccagcacccgaacctgggccctgcccacctacaacaatcacctctacaagcaaatctccaacagcacatctggaggatcttcaaatgacaacgcctacttcggctacagcaccccctgggggtattttgacttcaacagattccactgccacttctcaccacgtgactggcagcgactcatcaacaacaactggggatttcggcctaagcgactcaacttcaagctcttcaacattcaggtcaaagaggttacggacaacaatggagtcaagaccatcgccaataaccttaccagcacggtccaggtcttcacggactcagactatcagctcccgtacgtgctcgggtcggctcacgagggctgcctcccgccgttcccagcggacgttttcatgattcctcagtacgggtatctgacgcttaatgatggaagccaggccgtgggtcgttcgtccttttactgcctggaatatttcccgtcgcaaatgctaagaacgggtaacaacttccagttcagctacgagtttgagaacgtacctttccatagcagctacgctcacagccaaagcctggaccgactaatgaatccactcatcgaccaatacttgtactatctctcaaagactattaacggttctggacagaatcaacaaacgctaaaattcagtgtggccggacccagcaacatggctgtccagggaagaaactacatacctggacccagctaccgacaacaacgtgtctcaaccactgtgactcaaaacaacaacagcgaatttgcttggcctggagcttcttcttgggctctcaatggacgtaatagcttgatgaatcctggacctgctatggccagccacaaagaaggagaggaccgtttctttcctttgtctggatctttaatttttggcaaacaaggaactggaagagacaacgtggatgcggacaaagtcatgataaccaacgaagaagaaattaaaactactaacccggtagcaacggagtcctatggacaagtggccacaaaccaccagagtgcccaagcacaggcgcagaccggctgggttcaaaaccaaggaatacttccgggtatggtttggcaggacagagatgtgtacctgcaaggacccatttgggccaaaattcctcacacggacggcaactttcacccttctccgctgatgggagggtttggaatgaagcacccgcctcctcagatcctcatcaaaaacacacctgtacctgcggatcctccaacggccttcaacaaggacaagctgaactctttcatcacccagtattctactggccaagtcagcgtggagatcgagtgggagctgcagaaggaaaacagcaagcgctggaacccggagatccagtacacttccaactattacaagtctaataatgttgaatttgctgttaatactgaaggtgtatatagtgaaccccgccccattggcaccagatacctgactcgtaatctgtaattgcttgttaatcaataaaccgtttaattcgtttcagttgaactgcggcc

SEQ ID NO: 879 - protein, 736 aa, Artificial Sequence
  Description of Artificial Sequence: Synthetic polypeptide
MAADGYLPDWLEDNLSEGIREWWALKPGAPQPKANQQHQDNARGLVLPGYKYLGPGNGLDKGEPVNAVDAAALEHDKAYDQQLKAGDNPYLKYNHADAEFQERLKEDTSFGGNLGRAVFQAKKRLLEPLGLVEEAAKTAPGKKRPVEQSPQEPDSSAGIGKSGAQPAKKRLNFGQTGDTESVPDPQPIGEPPAAPSGVGSLTMASGGGAPVADNNEGADGVGSSSGNWHCDSQWLGDRVITTSTRTWALPTYNNHLYKQISNSTSGGSSNDNAYFGYSTPWGYFDFNRFHCHFSPRDWQRLINNNWGFRPKRLNFKLFNIQVKEVTDNNGVKTIANNLTSTVQVFTDSDYQLPYVLGSAHEGCLPPFPADVFMIPQYGYLTLNDGSQAVGRSSFYCLEYFPSQMLRTGNNFQFSYEFENVPFHSSYAHSQSLDRLMNPLIDQYLYYLSKTINGSGQNQQTLKFSVAGPSNMAVQGRNYIPGPSYRQQRVSTTVTQNNNSEFAWPGASSWALNGRNSLMNPGPAMASHKEGEDRFFPLSGSLIFGKQGTGRDNVDADKVMITNEEEIKTTNPVATESYGQVATNHQSAQAQAQTGWVQNQGILPGMVWQDRDVYLQGPIWAKIPHTDGNFHPSPLMGGFGMKHPPPQILIKNTPVPADPPTAFNKDKLNSFITQYSTGQVSVEIEWELQKENSKRWNPEIQYTSNYYKSNNVEFAVNTEGVYSEPRPIGTRYLTRNL

SEQ ID NO: 880 - DNA, 2580 bp, Artificial Sequence
  Description of Artificial Sequence: Synthetic polynucleotide
ccatcgacgtcagacgcggaagcttcgatcaactacgcggacaggtaccaaaacaaatgttctcgtcacgtgggcatgaatctgatgctgtttccctgcagacaatgcgagagactgaatcagaattcaaatatctgcttcactcacggtgtcaaagactgtttagagtgctttcccgtgtcagaatctcaacccgtttctgtcgtcaaaaaggcgtatcagaaactgtgctacattcatcacatcatgggaaaggtgccagacgcttgcactgcttgcgacctggtcaatgtggacttggatgactgtgtttctgaacaataaatgacttaaaccaggtatggctgccgatggttatcttccagattggctcgaggacaaccttagtgaaggaattcgcgagtggtgggctttgaaacctggagcccctcaacccaaggcaaatcaacaacatcaagacaacgctcgaggtcttgtgcttccgggttacaaataccttggacccggcaacggactcgacaagggggagccggtcaacgcagcagacgcggcggccctcgagcacgacaaggcctacgaccagcagctcaaggccggagacaacccgtacctcaagtacaaccacgccgacgccgagttccaggagcggctcaaagaagatacgtcttttgggggcaacctcgggcgagcagtcttccaggccaaaaagaggcttcttgaacctcttggtctggttgaggaagcggctaagacggctcctggaaagaagaggcctgtagagcagtctcctcgggaaccggactcctccgcgggtattggcaaatcgggtgcacagcccgctaaaaagagactcaatttcggtcagactggcgacacagagtcagtcccagaccctcaaccaatcggagaacctcccgcagccccctcaggtgtgggatctcttacaatggcttcaggtggtggcgcaccagtggcagacaataacgaaggtgccgatggagtgggtagttcctcgggaaattggcattgcgattcccaatggctgggggacagagtcatcaccaccagcacccgaacctgggccctgcccacctacaacaatcacctctacaagcaaatctccaacagcacatctggaggatcttcaaatgacaacgcctacttcggctacagcaccccctgggggtattttgacttcaacagattccactgccacttctcaccacgtgactggcagcgactcatcaacaacaactggggattccggcctaagcgactcaacttcaagctcttcaacattcaggtcaaagaggttacggacaacaatggagtcaagaccatcgccaataaccttaccagcacggtccaggtcttcacggactcagactatcagctcccgtacgtgctcgggtcggctcacgagggctgcctcccgccgttcccagcggacgttttcatgattcctcagtacgggtatctgacgcttaatgatggaagccaggccgtgggtcgttcgtccttttactgcctggaatatttcccgtcgcaaatgctaagaacgggtaacaacttccagttcagctacgagtttgagaacgtacctttccatagcagctacgctcacagccaaagcctggaccgactaatgaatccactcatcgaccaatacttgtactatctctcaaagactattaacggttctggacagaatcaacaaacgctaaaattcagtgtggccggacccagcaacatggctgtccagggaagaaactacatacctggacccagctaccgacaacaacgtgtctcaaccactgtgactcaaaacaacaacagcgaatttgcttggcctggagcttcttcttgggctctcaatggacgtaatagcttgatgaatcctggacctgctatggccagccacaaagaaggagaggaccgtttctttcctttgtctggatctttaatttttggcaaacaaggaactggaagagacaacgtggatgcggacaaagtcatgataaccaacgaagaagaaattaaaactactaacccggtagcaacggagtcctatggacaagtggccacaaaccaccagagtgcccaagcacaggcgcagaccggctgggttcaaaaccaaggaatacttccgggtatggtttggcaggacagagatgtgtacctgcaaggacccatttgggccaaaattcctcacacggacggcaactttcacccttctccgctgatgggagggtttggaatgaagcacccgcctcctcagatcctcatcaaaaacacacctgtacctgcggatcctccaacggccttcaacaaggacaagctgaactctttcatcacccagtattctactggccaagtcagcgtggagatcgagtgggaactgcagaaggaaaacagcaagcgctggaacccggagatccagtacacttccaactattacaagtctaataatgttgaatttgctgttaatactgaaggtgtatatagtgaaccccgccccattggcaccagatacctgactcgtaatctgtaattgcttgttaatcaataaaccgtttaatt

SEQ ID NO: 881 - protein, 736 aa, Artificial Sequence
  Description of Artificial Sequence: Synthetic polypeptide
MAADGYLPDWLEDNLSEGIREWWALKPGAPQPKANQQHQDNARGLVLPGYKYLGPGNGLDKGEPVNAADAAALEHDKAYDQQLKAGDNPYLKYNHADAEFQERLKEDTSFGGNLGRAVFQAKKRLLEPLGLVEEAAKTAPGKKRPVEQSPREPDSSAGIGKSGAQPAKKRLNFGQTGDTESVPDPQPIGEPPAAPSGVGSLTMASGGGAPVADNNEGADGVGSSSGNWHCDSQWLGDRVITTSTRTWALPTYNNHLYKQISNSTSGGSSNDNAYFGYSTPWGYFDFNRFHCHFSPRDWQRLINNNWGFRPKRLNFKLFNIQVKEVTDNNGVKTIANNLTSTVQVFTDSDYQLPYVLGSAHEGCLPPFPADVFMIPQYGYLTLNDGSQAVGRSSFYCLEYFPSQMLRTGNNFQFSYEFENVPFHSSYAHSQSLDRLMNPLIDQYLYYLSKTINGSGQNQQTLKFSVAGPSNMAVQGRNYIPGPSYRQQRVSTTVTQNNNSEFAWPGASSWALNGRNSLMNPGPAMASHKEGEDRFFPLSGSLIFGKQGTGRDNVDADKVMITNEEEIKTTNPVATESYGQVATNHQSAQAQAQTGWVQNQGILPGMVWQDRDVYLQGPIWAKIPHTDGNFHPSPLMGGFGMKHPPPQILIKNTPVPADPPTAFNKDKLNSFITQYSTGQVSVEIEWELQKENSKRWNPEIQYTSNYYKSNNVEFAVNTEGVYSEPRPIGTRYLTRNL

SEQ ID NO: 882 - DNA, 2601 bp, Artificial Sequence
  Description of Artificial Sequence: Synthetic polynucleotide
ccatcgacgtcagacgcggaagcttcgatcaactacgcggacaggtaccaaaacaaatgttctcgtcacgtgggcatgaatctgatgctgtttccctgcagacaatgcgagagactgaatcagaattcaaatatctgcttcactcacggtgtcaaagactgtttagagtgctttcccgtgtcagaatctcaacccgtttctgtcgtcaaaaaggcgtatcagaaactgtgctacattcatcacatcatgggaaaggtgccagacgcttgcactgcttgcgacctggtcaatgtggacttggatgactgtgtttctgaacaataaatgacttaaaccaggtatggctgccgatggttatcttccagattggctcgaggacaaccttagtgaaggaattcgcgagtggtgggctttgaaacctggagcccctcaacccaaggcaaatcaacaacatcaagacaacgctcgaggtcttgtgcttccgggttacaaataccttggacccggcaacggactcgacaagggggagccggtcaacgcagcagacgcggcggccctcgagcacgacaaggcctacgaccagcagctcaaggccggagacaacccgtacctcaagtacaaccacgccgacgccgagttccaggagcggctcaaagaagatacgtcttttgggggcaacctcgggcgagcagtctttcaggccaaaaagaggcttcttgaacctcttggtctggttgaggaagcggctaagacggctcctggaaagaagaggcctgtagagcagtctcctcaggaaccggactcctccgcgggtattggcaaatcgggtgcacagcccgctaaaaagagactcaatttcggtcagactggcgacacagagtcagtcccagaccctcaaccaatcggagaacctcccgcagccccctcaggtgtgggatctcttacaatggcttcatgtggtggcgcaccagtggcagacaataacgaaggtgccgatggagtgggtagttcctcgggaaattggcattgcgattcccaatggctgggggacagagtcatcaccaccagcacccgaacctgggccctgcccacctacaacaatcacctctacaagcaaatctccaacagcacatctggaggatcttcaaatgacaacgcctacttcggctacagcaccccctgggggtattttgacttcaacagattccactgccacttctcaccacgtgactggcagcgactcatcaacaacaactggggattccggcctaagcgactcaacttcaagctcttcaacattcaggtcaaagaggttacggacaacaatggagtcaagaccatcgccaataaccttaccagcacggtccaggtcttcacggactcagactatcagctcccgtacgtgctcgggtcggctcacgagggctgcctcccgccgttcccagcggacgttttcatgattcctcagtacgggtatctgacgcttaatgatggaagccaggccgtgggtcgttcgtccttttactgcctggaatatttcccgtcgcaaatgctaagaacgggtaacaacttccagttcagctacgagtttgagaacgtacctttccatagcagctacgctcacagccaaagcctggaccgactaatgaatccactcatcgaccaatacttgtactatctctcaaagactattaacggttctggacagaatcaacaaacgctaaaattcagtgtggccggacccagcaacatggctgtccagggaagaaactacatacctggacccagctaccgacaacaacgtgtctcaaccactgtgactcaaaacaacaacagcgaatttgcttggcctggagcttcttcttgggctctcaatggacgtaatagcttgatgaatcctggacctgctatggccagccacaaagaaggagaggaccgtttctttcctttgtctggatctttaatttttggcaaacaaggaactggaagagacaacgtggatgcggacaaagtcatgataaccaacgaagaagaaattaaaactactaacccggtagcaacggagtcctatggacaagtggccacaaaccaccagagtgcccaagcacaggcgcagaccggctgggttcaaaaccaaggaatacttccgggtatggtttggcaggacagagatgtgtacctgcaaggacccatttgggccaaaattcctcacacggacggcaactttcacccttctccgctgatgggagggtttggaatgaagcacccgcctcctcagatcctcatcaaaaacacacctgtacctgcggatcctccaacggccttcaacaaggacaagctgaactctttcatcacccagtattctactggccaagtcagcgtggagatcgagtgggagctgcagaaggaaaacagcaagcgctggaacccggagatccagtacacttccaactattacaagtctaataatgttgaatttgctgttaatactgaaggtgtatatagtgaaccccgccccattggcaccagatacctgactcgtaatctgtaattgcttgttaatcaataaaccgtttaattcgtttcagttgaactgcggcc

SEQ ID NO: 883 - protein, 736 aa, Artificial Sequence
  Description of Artificial Sequence: Synthetic polypeptide
MAADGYLPDWLEDNLSEGIREWWALKPGAPQPKANQQHQDNARGLVLPGYKYLGPGNGLDKGEPVNAADAAALEHDKAYDQQLKAGDNPYLKYNHADAEFQERLKEDTSFGGNLGRAVFQAKKRLLEPLGLVEEAAKTAPGKKRPVEQSPQEPDSSAGIGKSGAQPAKKRLNFGQTGDTESVPDPQPIGEPPAAPSGVGSLTMASCGGAPVADNNEGADGVGSSSGNWHCDSQWLGDRVITTSTRTWALPTYNNHLYKQISNSTSGGSSNDNAYFGYSTPWGYFDFNRFHCHFSPRDWQRLINNNWGFRPKRLNFKLFNIQVKEVTDNNGVKTIANNLTSTVQVFTDSDYQLPYVLGSAHEGCLPPFPADVFMIPQYGYLTLNDGSQAVGRSSFYCLEYFPSQMLRTGNNFQFSYEFENVPFHSSYAHSQSLDRLMNPLIDQYLYYLSKTINGSGQNQQTLKFSVAGPSNMAVQGRNYIPGPSYRQQRVSTTVTQNNNSEFAWPGASSWALNGRNSLMNPGPAMASHKEGEDRFFPLSGSLIFGKQGTGRDNVDADKVMITNEEEIKTTNPVATESYGQVATNHQSAQAQAQTGWVQNQGILPGMVWQDRDVYLQGPIWAKIPHTDGNFHPSPLMGGFGMKHPPPQILIKNTPVPADPPTAFNKDKLNSFITQYSTGQVSVEIEWELQKENSKRWNPEIQYTSNYYKSNNVEFAVNTEGVYSEPRPIGTRYLTRNL

SEQ ID NO: 884 - protein, 9 aa, Artificial Sequence
  Description of Artificial Sequence: Synthetic polypeptide
SADNNNSEY

SEQ ID NO: 885 - protein, 9 aa, Artificial Sequence
  Description of Artificial Sequence: Synthetic polypeptide
LIDQYLYYL

SEQ ID NO: 886 - protein, 9 aa, Artificial Sequence
  Description of Artificial Sequence: Synthetic polypeptide
VPQYGYLTL

SEQ ID NO: 887 - protein, 9 aa, Artificial Sequence
  Description of Artificial Sequence: Synthetic polypeptide
TTSTRTWAL

SEQ ID NO: 888 - protein, 9 aa, Artificial Sequence
  Description of Artificial Sequence: Synthetic polypeptide
YHLNGRDSL

SEQ ID NO: 889 - protein, 9 aa, Artificial Sequence
  Description of Artificial Sequence: Synthetic polypeptide
SQAVGRSSF

SEQ ID NO: 890 - protein, 9 aa, Artificial Sequence
  Description of Artificial Sequence: Synthetic polypeptide
VPANPSTTF

SEQ ID NO: 891 - protein, 9 aa, Artificial Sequence
  Description of Artificial Sequence: Synthetic polypeptide
FPQSGVLIF

SEQ ID NO: 892 - protein, 15 aa, Artificial Sequence
  Description of Artificial Sequence: Synthetic polypeptide
YFDFNRFHCHFSPRD

SEQ ID NO: 893 - protein, 15 aa, Artificial Sequence
  Description of Artificial Sequence: Synthetic polypeptide
VGNSSGNWHCDSTWM

SEQ ID NO: 894 - protein, 15 aa, Artificial Sequence
  Description of Artificial Sequence: Synthetic polypeptide
QFSQAGASDIRDQSR

SEQ ID NO: 895 - protein, 13 aa, Artificial Sequence
  Description of Artificial Sequence: Synthetic polypeptide
GASDIRQSRNWLP

SEQ ID NO: 896 - protein, 15 aa, Artificial Sequence
  Description of Artificial Sequence: Synthetic polypeptide
GNRQAATADVNTQGV

SEQ ID NO: 897 - protein, 9 aa, Artificial Sequence
  Description of Artificial Sequence: Synthetic polypeptide
LDRLMNPLI

SEQ ID NO: 898 - protein, 9 aa, Artificial Sequence
  Description of Artificial Sequence: Synthetic polypeptide
QPAKKRLNF

SEQ ID NO: 899 - DNA, 5591 bp, Artificial Sequence
  Description of Artificial Sequence: Synthetic polynucleotide
tgacagatctgcgcgcgatcgatctgcgcgctcgctcgctcactgaggccgcccgggcgtcgggcgacctttggtcgcccggcctcagtgagcgagcgagcgcgcagagagggagtggccaactccatcactaggggttccttgtagttaatgattaacccgccatgctacttatctacgtagccatgctctagagcggccgcacgcgtactagttattaatagtaatcaattacggggtcattagttcatagcccatatatggagttccgcgttacataacttacggtaaatggcccgcctggctgaccgcccaacgacccccgcccattgacgtcaataatgacgtatgttcccatagtaacgccaatagggactttccattgacgtcaatgggtggagtatttacggtaaactgcccacttggcagtacatcaagtgtatcatatgccaagtacgccccctattgacgtcaatgacggtaaatggcccgcctggcattatgcccagtacatgaccttatgggactttcctacttggcagtacatctacgtattagtcatcgctattaccatggtgatgcggttttggcagtacatcaatgggcgtggatagcggtttgactcacggggatttccaagtctccaccccattgacgtcaatgggagtttgttttggcaccaaaatcaacgggactttccaaaatgtcgtaacaactccgccccattgacgcaaatgggcggtaggcgtgtacggtgggaggtctatataagcagagctcgtttagtgaaccgtcagatcgcctggagacgccatccacgctgttttgacctccatagaagacaccgggaccgatccagcctccgcggattcgaatcccggccgggaacggtgcattggaacgcggattccccgtgccaagagtgacgtaagtaccgcctatagagtctataggcccacaaaaaatgctttcttcttttaatatacttttttgtttatcttatttctaatactttccctaatctctttctttcagggcaataatgatacaatgtatcatgcctctttgcaccattctaaagaataacagtgataatttctgggttaaggcaatagcaatatttctgcatataaatatttctgcatataaattgtaactgatgtaagaggtttcatattgctaatagcagctacaatccagctaccattctgcttttattttatggttgggataaggctggattattctgagtccaagctaggcccttttgctaatcatgttcatacctcttatcttcctcccacagctcctgggcaacgtgctggtctgtgtgctggcccatcactttggcaaagaattgggattcgaacatcgattgaattccccggggatccaccatgaacgcaagtgaattccgaaggagagggaaggagatggtggattacgtggccaactacatggaaggcattgagggacgccaggtctaccctgacgtggagcccgggtacctgcggccgctgatccctgccgctgcccctcaggagccagacacgtttgaggacatcatcaacgacgttgagaagataatcatgcctggggtgacgcactggcacagcccctacttcttcgcctacttccccactgccagctcgtacccggccatgcttgcggacatgctgtgcggggccattggctgcatcggcttctcctgggcggcaagcccagcatgcacagagctggagactgtgatgatggactggctcgggaagatgctggaactaccaaaggcatttttgaatgagaaagctggagaagggggaggagtgatccagggaagtgccagtgaagccaccctggtggccctgctggccgctcggaccaaagtgatccatcggctgcaggcagcgtccccagagctcacacaggccgctatcatggagaagctggtggcttactcatccgatcaggcacactcctcagtggaaagagctgggttaattggtggagtgaaattaaaagccatcccctcagatggcaacttcgccatgcgtgcgtctgccctgcaggaagccctggagagagacaaagcggctggcctgattcctttctttatggttgccaccctggggaccacaacatgctgctcctttgacaatctcttagaagtcggtcctatctgcaacaaggaagacatatggctgcacgttgatgcagcctacgcaggcagtgcattcatctgccctgagttccggcaccttctgaatggagtggagtttgcagattcattcaactttaatccccacaaatggctattggtgaattttgactgttctgccatgtgggtgaaaaagagaacagacttaacgggagcctttagactggaccccacttacctgaagcacagccatcaggattcagggcttatcactgactaccggcattggcagataccactgggcagaagatttcgctctttgaaaatgtggtttgtatttaggatgtatggagtcaaaggactgcaggcttatatccgcaagcatgtccagctgtcccatgagtttgagtcactggtgcgccaggatccccgctttgaaatctgtgtggaagtcattctggggcttgtctgctttcggctaaagggttccaacaaagtgaatgaagctcttctgcaaagaataaacagtgccaaaaaaatccacttggttccatgtcacctcagggacaagtttgtcctgcgctttgccatctgttctcgcacggtggaatctgcccatgtgcagcgggcctgggaacacatcaaagagctggcggccgacgtgctgcgagcagagagggagtaggagtgaagccagctgcaggaatcaaaaattgaagagagatatatctgaaaactggaataagaagcaaataaatatcatcctgccttcatggaactcagctgtctgtggcttcccatgtctttctccaaagttatccagagggttgtgattttgtctgcttagtatctcatcaacaaagaaatattatttgctaattaaaaagttaatcttcatggccatagcttttattcattagctgtgatttttgttgattaaaacattatagattttcatgttcttgcagtcatcagaagtggtaggaaagcctcactgatatattttccagggcaatcaatgttcacgcaacttgaaattatatctgtggtcttcaaattgtcttttgtcatgtggctaaatgcctaataaggaattaattcgatatcaagctatccaacacactggtagggataacagggtaatctcgaggcaagcttgggcccggtacccaattcgccctatagtgagtcgtattacgcgcgcagcggccgaccatggcccaacttgtttattgcagcttataatggttacaaataaagcaatagcatcacaaatttcacaaataaagcatttttttcactgcattctagttgtggtttgtccaaactcatcaatgtatcttatcatgtctggatctccggacacgtgcggaccgagcggccgctctagagcatggctacgtagataagtagcatggcgggttaatcattaactacaaggaacccctagtgatggagttggccactccctctctgcgcgctcgctcgctcactgaggccgggcgaccaaaggtcgcccgacgcccgggctttgcccgggcggcctcagtgagcgagcgagcgcgcagatcagcgctttaaattcagaagaactcgtcaagaaggcgatagaaggcgatgcgctgcgaatcgggagcggcgataccgtaaagcacgaggaagcggtcagcccattcgccgccaagctcttcagcaatatcacgggtagccaacgctatgtcctgatagcggtccgccacacccagccggccacagtcgatgaatccagaaaagcggccattttccaccatgatattcggcaagcaggcatcgccatgggtcacgacgagatcctcgccgtcgggcatgctcgccttgagcctggcgaacagttcggctggcgcgagcccctgatgctcttcgtccagatcatcctgatcgacaagaccggcttccatccgagtacgtgctcgctcgatgcgatgtttcgcttggtggtcgaatgggcaggtagccggatcaagcgtatgcagccgccgcattgcatcagccatgatggatactttctcggcaggagcaaggtgagatgacaggagatcctgccccggcacttcgcccaatagcagccagtcccttcccgcttcagtgacaacgtcgagcacagctgcgcaaggaacgcccgtcgtggccagccacgatagccgcgctgcctcgtcttgcagttcattcagggcaccggacaggtcggtcttgacaaaaagaaccgggcgcccctgcgctgacagccggaacacggcggcatcagagcagccgattgtctgttgtgcccagtcatagccgaatagcctctccacccaagcggccggagaacctgcgtgcaatccatcttgttcaatcatgcgaaacgatcctcatcctgtctcttgatcagatcttgatcccctgcgccatcagatctttggcggcaagaaagccatccagtttactttgcagggcttcccaaccttaccagagggcgccccagctggcaattccggttcgcttgctgtccataaaaccgcccagtctagctatcgccatgtaagcccactgcaagctacctgctttctctttgcgcttgcgttttcccttgtccagatagcccagtagctgacattcatccggggtcagcaccgtttctgcggactggctttctacgtgaaaaggatctaggtgaagatcctttttgataatctcatgaccaaaatcccttaacgtgagttttcgttccactgagcgtcagaccccgtagaaaagatcaaaggatcttcttgagatcctttttttctgcgcgtaatctgctgcttgcaaacaaaaaaaccaccgctaccagcggtggtttgtttgccggatcaagagctaccaactctttttccgaaggtaactggcttcagcagagcgcagataccaaatactgttcttctagtgtagccgtagttaggccaccacttcaagaactctgtagcaccgcctacatacctcgctctgctaatcctgttaccagtggctgctgccagtggcgataagtcgtgtcttaccgggttggactcaagacgatagttaccggataaggcgcagcggtcgggctgaacggggggttcgtgcacacagcccagcttggagcgaacgacctacaccgaactgagatacctacagcgtgagctatgagaaagcgccacgcttcccgaagggagaaaggcggacaggtatccggtaagcggcagggtcggaacaggagagcgcacgagggagcttccagggggaaacgcctggtatctttatagtcctgtcgggtttcgccacctctgacttgagcgtcgatttttgtgatgctcgtcaggggggcggagcctatggaaaaacgccagcaacgcggcctttttacggttcctggccttttgctggccttttgctcaca

We claim:

1. A method of treating a disease associated with a deficiency in aromatic L-amino acid decarboxylase (AADC), the method comprising: providing a composition which comprises an AAV particle; providing a subject afflicted with a disease associated with a deficiency in aromatic L-amino acid decarboxylase (AADC); and administering the composition to one or both putamen of the subject; wherein the AAV particle comprises an AADC polynucleotide which comprises a 5′ inverted terminal repeat (ITR), a promoter sequence region, an AADC sequence region comprising a nucleotide sequence encoding SEQ ID NO: 1, a poly(A) signal sequence region, and a 3′ ITR.

2. The method of claim 1, wherein the AADC polynucleotide has at least 95% identity to any of the sequences selected from SEQ ID NOs 2-24.

3. The method of claim 1, wherein the AADC polynucleotide has at least 99% identity to any of the sequences selected from SEQ ID NOs 2-24.

4. The method of claim 1, wherein the AAV particle comprises a capsid serotype selected from the group consisting of AAV1, AAV2, AAV2G9, AAV3, AAV3a, AAV3b, AAV3-3, AAV4, AAV4-4, AAV5, AAV6, AAV6.1, AAV6.2, AAV6.1.2, AAV7, AAV7.2, AAV8, AAV9, AAV9.11, AAV9.13, AAV9.16, AAV9.24, AAV9.45, AAV9.47, AAV9.61, AAV9.68, AAV9.84, AAV9.9, AAV10, AAV11, AAV12, AAV16.3, AAV24.1, AAV27.3, AAV42.12, AAV42-1b, AAV42-2, AAV42-3a, AAV42-3b, AAV42-4, AAV42-5a, AAV42-5b, AAV42-6b, AAV42-8, AAV42-10, AAV42-11, AAV42-12, AAV42-13, AAV42-15, AAV42-aa, AAV43-1, AAV43-12, AAV43-20, AAV43-21, AAV43-23, AAV43-25, AAV43-5, AAV44.1, AAV44.2, AAV44.5, AAV223.1, AAV223.2, AAV223.4, AAV223.5, AAV223.6, AAV223.7, AAV1-7/rh.48, AAV1-8/rh.49, AAV2-15/rh.62, AAV2-3/rh.61, AAV2-4/rh.50, AAV2-5/rh.51, AAV3.1/hu.6, AAV3.1/hu.9, AAV3-9/rh.52, AAV3-11/rh.53, AAV4-8/r11.64, AAV4-9/rh.54, AAV4-19/rh.55, AAV5-3/rh.57, AAV5-22/rh.58, AAV7.3/hu.7, AAV16.8/hu.10, AAV16.12/hu.11, AAV29.3/bb.1, AAV29.5/bb.2, AAV106.1/hu.37, AAV114.3/hu.40, AAV127.2/hu.41, AAV127.5/hu.42, AAV128.3/hu.44, AAV130.4/hu.48, AAV145.1/hu.53, AAV145.5/hu.54, AAV145.6/hu.55, AAV161.10/hu.60, AAV161.6/hu.61, AAV33.12/hu.17, AAV33.4/hu.15, AAV33.8/hu.16, AAV52/hu.19, AAV52.1/hu.20, AAV58.2/hu.25, AAVA3.3, AAVA3.4, AAVA3.5, AAVA3.7, AAVC1, AAVC2, AAVC5, AAV-DJ, AAV-DJ8, AAVF3, AAVF5, AAVH2, AAVrh.72, AAVhu.8, AAVrh.68, AAVrh.70, AAVpi.1, AAVpi.3, AAVpi.2, AAVrh.60, AAVrh.44, AAVrh.65, AAVrh.55, AAVrh.47, AAVrh.69, AAVrh.45, AAVrh.59, AAVhu.12, AAVH6, AAVLK03, AAVH-1/hu.1, AAVH-5/hu.3, AAVLG-10/rh.40, AAVLG-4/rh.38, AAVLG-9/hu.39, AAVN721-8/rh.43, AAVCh.5, AAVCh.5R1, AAVcy.2, AAVcy.3, AAVcy.4, AAVcy.5, AAVCy.5R1, AAVCy.5R2, AAVCy.5R3, AAVCy.5R4, AAVcy.6, AAVhu.1, AAVhu.2, AAVhu.3, AAVhu.4, AAVhu.5, AAVhu.6, AAVhu.7, AAVhu.9, AAVhu.10, AAVhu.11, AAVhu.13, AAVhu.15, AAVhu.16, AAVhu.17, AAVhu.18, AAVhu.20, AAVhu.21, AAVhu.22, AAVhu.23.2, AAVhu.24, AAVhu.25, AAVhu.27, AAVhu.28, AAVhu.29, AAVhu.29R, AAVhu.31, AAVhu.32, AAVhu.34, AAVhu.35, AAVhu.37, AAVhu.39, AAVhu.40, AAVhu.41, AAVhu.42, AAVhu.43, AAVhu.44, AAVhu.44R1, AAVhu.44R2, AAVhu.44R3, AAVhu.45, AAVhu.46, AAVhu.47, AAVhu.48, AAVhu.48R1, AAVhu.48R2, AAVhu.48R3, AAVhu.49, AAVhu.51, AAVhu.52, AAVhu.54, AAVhu.55, AAVhu.56, AAVhu.57, AAVhu.58, AAVhu.60, AAVhu.61, AAVhu.63, AAVhu.64, AAVhu.66, AAVhu.67, AAVhu.14/9, AAVhu.t 19, AAVrh.2, AAVrh.2R, AAVrh.8, AAVrh.8R, AAVrh.10, AAVrh.12, AAVrh.13, AAVrh.13R, AAVrh.14, AAVrh.17, AAVrh.18, AAVrh.19, AAVrh.20, AAVrh.21, AAVrh.22, AAVrh.23, AAVrh.24, AAVrh.25, AAVrh.31, AAVrh.32, AAVrh.33, AAVrh.34, AAVrh.35, AAVrh.36, AAVrh.37, AAVrh.37R2, AAVrh.38, AAVrh.39, AAVrh.40, AAVrh.46, AAVrh.48, AAVrh.48.1, AAVrh.48.1.2, AAVrh.48.2, AAVrh.49, AAVrh.51, AAVrh.52, AAVrh.53, AAVrh.54, AAVrh.56, AAVrh.57, AAVrh.58, AAVrh.61, AAVrh.64, AAVrh.64R1, AAVrh.64R2, AAVrh.67, AAVrh.73, AAVrh.74, AAVrh8R, AAVrh8R A586R mutant, AAVrh8R R533A mutant, AAAV, BAAV, caprine AAV, bovine AAV, AAVhE1.1, AAVhEr1.5, AAVhER1.14, AAVhEr1.8, AAVhEr1.16, AAVhEr1.18, AAVhEr1.35, AAVhEr1.7, AAVhEr1.36, AAVhEr2.29, AAVhEr2.4, AAVhEr2.16, AAVhEr2.30, AAVhEr2.31, AAVhEr2.36, AAVhER1.23, AAVhEr3.1, AAV2.5T, AAV-PAEC, AAV-LK01, AAV-LK02, AAV-LK03, AAV-LK04, AAV-LK05, AAV-LK06, AAV-LK07, AAV-LK08, AAV-LK09, AAV-LK10, AAV-LK11, AAV-LK12, AAV-LK13, AAV-LK14, AAV-LK15, AAV-LK16, AAV-LK17, AAV-LK18, AAV-LK19, AAV-PAEC2, AAV-PAEC4, AAV-PAEC6, AAV-PAEC7, AAV-PAEC8, AAV-PAEC11, AAV-PAEC12, AAV-2-pre-miRNA-101, AAV-8h, AAV-8b, AAV-h, AAV-b, AAV SM 10-2, AAV Shuffle 100-1, AAV Shuffle 100-3, AAV Shuffle 100-7, AAV Shuffle 10-2, AAV Shuffle 10-6, AAV Shuffle 10-8, AAV Shuffle 100-2, AAV SM 10-1, AAV SM 10-8, AAV SM 100-3, AAV SM 100-10, BNP61 AAV, BNP62 AAV, BNP63 AAV, AAVrh.50, AAVrh.43, AAVrh.62, AAVrh.48, AAVhu.19, AAVhu.11, AAVhu.53, AAV4-8/rh.64, AAVLG-9/hu.39, AAV54.5/hu.23, AAV54.2/hu.22, AAV54.7/hu.24, AAV54.1/hu.21, AAV54.4R/hu.27, AAV46.2/hu.28, AAV46.6/hu.29, AAV128.1/hu.43, true type AAV (ttAAV), UPENN AAV 10, Japanese AAV 10, AAV CBr-7.1, AAV CBr-7.10, AAV CBr-7.2, AAV CBr-7.3, AAV CBr-7.4, AAV CBr-7.5, AAV CBr-7.7, AAV CBr-7.8, AAV CBr-B7.3, AAV CBr-B7.4, AAV CBr-E1, AAV CBr-E2, AAV CBr-E3, AAV CBr-E4, AAV CBr-E5, AAV CBr-e5, AAV CBr-E6, AAV CBr-E7, AAV CBr-E8, AAV CHt-1, AAV CHt-2, AAV CHt-3, AAV CHt-6.1, AAV CHt-6.10, AAV CHt-6.5, AAV CHt-6.6, AAV CHt-6.7, AAV CHt-6.8, AAV CHt-P1, AAV CHt-P2, AAV CHt-P5, AAV CHt-P6, AAV CHt-P8, AAV CHt-P9, AAV CKd-1, AAV CKd-10, AAV CKd-2, AAV CKd-3, AAV CKd-4, AAV CKd-6, AAV CKd-7, AAV CKd-8, AAV CKd-B1, AAV CKd-B2, AAV CKd-B3, AAV CKd-B4, AAV CKd-B5, AAV CKd-B6, AAV CKd-B7, AAV CKd-B8, AAV CKd-H1, AAV CKd-H2, AAV CKd-H3, AAV CKd-H4, AAV CKd-H5, AAV CKd-H6, AAV CKd-N3, AAV CKd-N4, AAV CKd-N9, AAV CLg-F1, AAV CLg-F2, AAV CLg-F3, AAV CLg-F4, AAV CLg-F5, AAV CLg-F6, AAV CLg-F7, AAV CLg-F8, AAV CLv-1, AAV CLv1-1, AAV Clv1-10, AAV CLv1-2, AAV CLv-12, AAV CLv1-3, AAV CLv-13, AAV CLv1-4, AAV Clv1-7, AAV Clv1-8, AAV Clv1-9, AAV CLv-2, AAV CLv-3, AAV CLv-4, AAV CLv-6, AAV CLv-8, AAV CLv-D1, AAV CLv-D2, AAV CLv-D3, AAV CLv-D4, AAV CLv-D5, AAV CLv-D6, AAV CLv-D7, AAV CLv-D8, AAV CLv-E1, AAV CLv-K1, AAV CLv-K3, AAV CLv-K6, AAV CLv-L4, AAV CLv-L5, AAV CLv-L6, AAV CLv-M1, AAV CLv-M11, AAV CLv-M2, AAV CLv-M5, AAV CLv-M6, AAV CLv-M7, AAV CLv-M8, AAV CLv-M9, AAV CLv-R1, AAV CLv-R2, AAV CLv-R3, AAV CLv-R4, AAV CLv-R5, AAV CLv-R6, AAV CLv-R7, AAV CLv-R8, AAV CLv-R9, AAV CSp-1, AAV CSp-10, AAV CSp-11, AAV CSp-2, AAV CSp-3, AAV CSp-4, AAV CSp-6, AAV CSp-7, AAV CSp-8, AAV CSp-8.10, AAV CSp-8.2, AAV CSp-8.4, AAV CSp-8.5, AAV CSp-8.6, AAV CSp-8.7, AAV CSp-8.8, AAV CSp-8.9, AAV CSp-9, AAV.hu.48R3, AAV.VR-355, AAV3B, AAV4, AAV5, AAVF1/HSC1, AAVF11/HSC11, AAVF12/HSC12, AAVF13/HSC13, AAVF14/HSC14, AAVF15/HSC15, AAVF16/HSC16, AAVF17/HSC17, AAVF2/HSC2, AAVF3/HSC3, AAVF4/HSC4, AAVF5/HSC5, AAVF6/HSC6, AAVF7/HSC7, AAVF8/HSC8, and/or AAVF9/HSC9.

5. The method of claim 4, wherein the capsid serotype is selected from the group consisting of AAV2, AAV6, AAVrh10, AAV9 (hu14), AAV-DJ and AAV9.47.

6. The method of claim 1, wherein the 5′ ITR or the 3′ ITR is 119 nucleotides in length.

7. The method of claim 1, wherein the 5′ ITR or the 3′ ITR is 130 nucleotides in length.

8. The method of claim 1, wherein the 5′ ITR is 119 nucleotides in length and the wherein the 3′ ITR is 130 nucleotides in length.

9. The method of claim 1, wherein the 5′ ITR which is 130 nucleotides in length and the wherein the 3′ ITR which is 119 nucleotides in length.

10. The method of claim 8, wherein the promoter sequence region comprises an enhancer element, a promoter element, a first exon region, a first intron region, a second intron region and a second exon region.

11. The method of claim 10, wherein the enhancer element and the promoter element are derived from CMV.

12. The method of claim 11, wherein the first exon region is ie1 exon 1 or fragments thereof, the first intron region is ie1 intron 1 or fragments thereof, the second intron region is hBglobin intron 2 or fragments thereof and the second exon region is hBglobin exon 3 or fragments thereof.

13. The method of claim 12, wherein the poly(A) signal is derived from a simian virus 40 (SV40) gene.

14. The method of claim 13, wherein the disease associated with a deficiency in aromatic L-amino acid decarboxylase (AADC) is AADC Deficiency (AADCD).

15. The method of claim 13, wherein the disease associated with a deficiency in aromatic L-amino acid decarboxylase (AADC) is Parkinson's Disease (PD).

16. The method of claim 15, wherein AADC polynucleotide comprises SEQ ID NO. 899.

17. The method of claim 1, wherein AADC polynucleotide comprises SEQ ID NO. 899.

18. The method of claim 1, wherein the ratio of AAV viral particles comprising the AADC polynucleotide to AAV viral particles without the AADC polynucleotide in the composition is at least 70:30.

19. The method of claim 1, wherein the ratio of AAV viral particles comprising the AADC polynucleotide to AAV viral particles without the AADC polynucleotide in the composition is at least 85:15.

20. The method of claim 1, wherein the ratio of AAV viral particles comprising the AADC polynucleotide to AAV viral particles without the AADC polynucleotide in the composition is at least 100:0.
